(19) United States
(12) Patent Application Publication
(10) Pub. No.: US 2020/0199555 A1
(43) Pub. Date: Jun. 25, 2020

(54) CAS PROTEINS WITH REDUCED IMMUNOGENICITY AND METHODS OF SCREENING THEREOF

(71) Applicants: THE BROAD INSTITUTE, INC., Cambridge, MA (US); MASSACHUSETTS INSTITUTE OF TECHNOLOGY, Cambridge, MA (US)

(72) Inventor: Feng Zhang, Cambridge, MA (US)

(73) Assignees: THE BROAD INSTITUTE, INC., Cambridge, MA (US); MASSACHUSETTS INSTITUTE OF TECHNOLOGY, Cambridge, MA (US)

(21) Appl. No.: 16/704,857

(22) Filed: Dec. 5, 2019

Related U.S. Application Data
(60) Provisional application No. 62/775,839, filed on Dec. 5, 2018.
(60) Provisional application No. 62/775,832, filed on Dec. 5, 2018.
(60) Provisional application No. 62/775,860, filed on Dec. 5, 2018.
(60) Provisional application No. 62/775,855, filed on Dec. 5, 2018.
(60) Provisional application No. 62/775,877, filed on Dec. 5, 2018.
(60) Provisional application No. 62/775,812, filed on Dec. 5, 2018.

(51) Int. Cl. C12N 9/22; C12N 15/90

(52) U.S. Cl. CPC C12N 9/22; C12N 2310/20; C12N 15/907

(57) ABSTRACT

The present disclosure generally relates to systems, methods and compositions related to Clustered Regularly Interspaced Short Palindromic Repeats (CRISPR) and components thereof. The present disclosure also relates to methods, systems, and compostions modified to reduce immunogenicity. Additionally, the present disclosure relates to methods for developing or designing CRISPR-Cas system based therapy or therapeutics.

### CROSS-REFERENCE TO RELATED APPLICATIONS

[0001] This application claims the benefit of U.S. Provisional Application No. 62/775,839, filed Dec. 5, 2018, U.S. Provisional Application No. 62/775,832, filed Dec. 5, 2018, U.S. Provisional Application No. 62/775,860, filed Dec. 5, 2018, U.S. Provisional Application No. 62/775,855, filed Dec. 5, 2018, U.S. Provisional Application No. 62/775,877, filed Dec. 5, 2018, and U.S. Provisional Application No. 62/775,812, filed Dec. 5, 2018. The entire contents of the above-identified applications are hereby fully incorporated herein by reference.

### STATEMENT AS TO FEDERALLY SPONSORED RESEARCH

[0002] This invention was made with government support under Grant Nos. MH100706, MH110049, and HL141201 awarded by the National Institutes of Health. The government has certain rights in the invention.

### REFERENCE TO AN ELECTRONIC SEQUENCE LISTING

[0003] The contents of the electronic sequence listing (“BROD_4450US_ST25.txt”; size is 1,736,970 bytes and it was created on Dec. 5, 2019) is herein incorporated by reference in its entirety.

### TECHNICAL FIELD

[0004] The subject matter disclosed herein generally relates to systems, methods and compositions related to Clustered Regularly Interspaced Short Palindromic Repeats (CRISPR) and components thereof. The present invention also generally relates to methods, systems, and compositions modified to reduce immunogenicity. Additionally, the present invention relates to methods for developing or designing CRISPR-Cas system based therapy or therapeutics.

### BACKGROUND

[0005] Recent advances in genome sequencing techniques and analysis methods have significantly accelerated the ability to catalog and map genetic factors associated with a diverse range of biological functions and diseases. Precise genome targeting technologies are needed to enable systematic reverse engineering of causal genetic variations by allowing selective perturbation of individual genetic elements, as well as to advance synthetic biology, biotechnological, and medical applications. Although genome-editing techniques such as designer zinc fingers, transcription activator-like effectors (TALEs), or homing meganucleases are available for producing targeted genome perturbations, there remains a need for new genome engineering technologies that employ novel strategies and molecular mechanisms and are affordable, easy to set up, scalable, and amenable to targeting multiple positions within the eukaryotic genome. This would provide a major resource for new applications in genome engineering and biotechnology.

[0006] The CRISPR-Cas systems of bacterial and archaeal adaptive immunity show extreme diversity of protein composition and genomic loci architecture. The CRISPR-Cas system loci has more than 50 gene families and there is no strictly universal genes indicating fast evolution and extreme diversity of loci architecture. So far, adopting a multi-pronged approach, there is comprehensive cas gene identification of about 395 profiles for 93 Cas proteins. Classification includes signature gene profiles plus signatures of locus architecture. A new classification of CRISPR-Cas systems is proposed in which these systems are broadly divided into two classes, Class 1 with multisubunit effector complexes and Class 2 with single-subunit effector modules exemplified by the Cas9 protein. Novel effector proteins associated with Class 2 CRISPR-Cas systems may be developed as powerful genome engineering tools and the prediction of putative novel effector proteins and their engineering and optimization is important.

[0007] The development of CRISPR-Cas RNA-guided endonucleases for eukaryotic genome editing has sparked intense interest in the use of this technology for therapeutic applications. Extensive research has led to the identification of different technologies which can address the challenges of safety and efficacy. There are still challenges to overcome in the development of CRISPR-based therapeutics, including immunogenicity of CRISPR-Cas9 in order to allow the translation of these genome editing technologies to the clinic.

[0008] Citation or identification of any document in this application is not an admission that such document is available as prior art to the present invention.

### SUMMARY

[0009] In one aspect, the present disclosure provides a method of reducing immunogenicity of a Cas protein which comprises mutating one or more immunogenic T cell epitopes.

[0010] In some embodiments, T cell epitopes are ordered by determining immunogenicity and one or more of the ten most immunogenic T cell epitopes are mutated. In some embodiments, determining immunogenicity comprises measuring affinity of a peptide containing the epitope for one or more MHC molecule. In some embodiments, determining immunogenicity comprises comparing a peptide containing the epitope to a host proteome. In some embodiments, the method comprises mutating Cas proteins containing one or more mutations at one or more amino acid positions and screening the mutant proteins for one or more Cas activities. In some embodiments, the mutating and screening are performed using a phage display system. In some embodiments, the mutating and screening are performed using phage-assisted continuous evolution (PACE). In some embodiments, the nuclease activity of the Cas protein is preserved. In some embodiments, one or more active site residues are unchanged. In some embodiments, one or more residues that determine complex formation with a guide are unchanged. In some embodiments, the target specificity of a CRISPR system comprising the Cas protein is maintained or increased. In some embodiments, the method comprises deleting, inserting, or mutating one or more amino acids in the immunogenic T cell epitope. In some embodiments, the identification of a T cell epitope comprises determining the sequence of one or more peptides from the Cas protein that bind to an MHC receptor. In some embodiments, the identification of a T cell epitope comprises comparison of the CRISPR protein to a database of peptides that bind to an MHC receptor. In some embodiments, the comparison is in silico. In some embodiments, the MHC receptor is a class I MHC receptor. In some embodiments, the MHC receptor is a class II MHC receptor.

[0011] In some embodiments, the engineered Cas protein is a class 2 Cas protein. In some embodiments, the engineered Cas protein is Type II, Type V, or Type VI Cas protein. In some embodiments, the Cas protein comprises Cas9, Cas12a, Cas12b, Cas13a, Cas13b, or Cas13c.

[0012] In some embodiments, the Cas protein is associated with a functional domain. In some embodiments, the functional domain comprises a mutation that reduces immunogenicity. In some embodiments, the functional domain comprises an activator, a repressor, or a DNA methylase. In some embodiments, the functional domain comprises a base editor.

[0013] In another aspect, the present disclosure provides an engineered Cas protein which comprises at least one mutated T cell epitope, wherein the T cell epitope has reduced immunogenicity as compared to the corresponding T cell epitope of a naturally occurring Cas protein, whereby the engineered Cas protein comprises reduced immunogenicity as compared to the naturally occurring Cas protein. In some embodiments, the immunogenicity of the T cell epitope is measured in silico. In some embodiments, the immunogenicity of the CRISPR protein is measured in a host.

[0014] In another aspect, the present disclosure provides a polypeptide comprising an engineered Cas protein having reduced immunogenicity compared to a naturally occurring Cas protein. In some embodiments, the Cas protein comprises at least one T cell epitope mutation. In some embodiments, the mutation comprises an insertion, deletion, or substitution. In some embodiments, the Cas protein is glycosylated. In some embodiments, the polypeptide comprises one or more nuclear localization signals (NLS).

[0015] In some embodiments, the engineered Cas protein comprises a Cas nuclease catalytic site. In some embodiments, the engineered Cas protein is a nickase. In some embodiments, the engineered Cas protein is catalytically inactive. In some embodiments, the engineered Cas protein is a class 2 Cas protein. In some embodiments, the engineered Cas protein is Type II, Type V, or Type VI Cas protein. In some embodiments, the engineered Cas protein is Cas9, Cas12, or Cas13.

[0016] In some embodiments, the Cas protein is Cas9. In some embodiments, the Cas9 is from Corynebacter, Sutterella, Legionella, Treponema, Filifactor, Eubacterium, Streptococcus, Lactobacillus, Mycoplasma, Bacteroides, Flaviivola, Flavobacterium, Sphaerochaeta, Azospirillum, Gluconacetobacter, Neisseria, Roseburia, Parvibaculum, Staphylococcus, Nitratifractor, or Campylobacter. In some embodiments, the Cas9 comprises a mutation at D10, E762, H840, N854, N863, or D986 with reference to the position numbering of a Streptococcus pyogenes Cas9. In some embodiments, the mutation comprises D10A, E762A, H840A, N854A, N863A or D986A.

[0017] In some embodiments, the Cas protein is Cas12a. In some embodiments, the Cas12a is from Francisella tularensis 1, Prevotella albensis, Lachnospiraceae bacterium MC2017 1, Butyrivibrio proteoclasticus, Peregrinibacteria bacterium GW2011_GWA2_33_10, Parcubacteria bacterium GW2011_GWC2_44_17, Smithella sp. SCADC, Acidaminococcus sp. BV3L6, Lachnospiraceae bacterium MA2020, Candidatus Methanoplasma termitum, Eubacterium eligens, Moraxella bovoculi 237, Leptospira inadai, Lachnospiraceae bacterium ND2006, Porphyromonas crevioricanis 3, Prevotella disiens, or Porphyromonas macacae.

[0018] In some embodiments, the Cas protein is Cas12b. In some embodiments, the Cas12b is from Alicyclobacillus, Desulfovibrio, Desulfonatronum, Opitutaceae, Tuberibacillus, Bacillus, Brevibacillus, Candidatus, Desulfatirhabdium, Elusimicrobia, Citrobacter, Methylobacterium, Omnitrophicai, Phycisphaerae, Planctomycetes, Spirochaetes, or Verrucomicrobiaceae. In some embodiments, the Cas12b comprises a mnutation at R911, R1000, or R1015 with reference to the position numbering of a Alicyclobacillus acidoterrestris Cas12b.

[0019] In some embodiments, the Cas protein is Cas13. In some embodiments, the Cas13 is from Streptococcus, Campylobacter, Nitratifractor, Staphylococcus, Parvibaculum, Roseburia, Neisseria, Gluconacetobacter, Azospirillum, Sphaerochaeta, Lactobacillus, Eubacterium, Corynebacter, Carnobacterium, Rhodobacter, Listeria, Paludibacter, Clostridium, Lachnospiraceae, Clostridiaridium, Leptotrichia, Francisella, Legionella, Alicyclobacillus, Methanomethyophilus, Porphyromonas, Prevotella, Bacteroidetes, Helcococcus, Letospira, Desulfovibrio, Desulfonatronum, Opitutaceae, Tuberibacillus, Bacillus, Brevibacilus, Methylobacterium or Acidaminococcus.

[0020] In another aspect, the present disclosure provides a nucleic acid encoding the engineered Cas protein herein.

[0021] In another aspect, the present disclosure provides a cell comprising the nucleic acid herein.

[0022] In another aspect, the present disclosure provides a composition comprising an engineered Cas protein or a nucleotide sequence encoding the Cas protein, and at least one guide designed to form a complex with the Cas protein or at least one nucleotide sequence encoding the at least one guide, wherein the guide is designed to hybridize with a target sequence of a DNA molecule in a cell. In some embodiments, the Cas protein is Cas9, Cas12, or Cas13. In some embodiments, the Cas protein comprises one or more nuclear localization signals (NLSs). In some embodiments, the guide comprises a chimeric RNA. In some embodiments, the guide comprises a crRNA and a tracrRNA. In some embodiments, the composition further comprises a homologous recombination (HR) template. In some embodiments, the Cas protein is associated with one or more functional domains. In some embodiments, the Cas protein is associated with one or more functional domains; and the Cas protein comprises one or more mutations within a RuvC and/or Nuc domain, whereby the complex can deliver an epigenetic modifier or a transcriptional or translational activation or repression signal. In some embodiments, the Cas protein is associated with adenosine deaminase or cytidine deaminase. In some embodiments, the cell is a mammalian cell. In some embodiments, the cell is a human cell. In some embodiments, the Cas protein is Cas13, and optionally the Cas13 comprises one or more mutations within an HEPN domain, such as R597A, H602A, R1278A, and/or H1283A, whereby the complex can deliver an epigenetic modifier or a transcriptional or translational activation or repression signal.

[0023] In another aspect, the present disclosure provides a vector system for providing the composition herein, which comprises one or more vectors comprising: a first regulatory element operably linked to a nucleotide sequence encoding a deimmunized Cas protein, and i) a) a second regulatory element operably linked to a nucleotide sequence encoding the crRNA, and b) a third regulatory element operably linked to a nucleotide sequence encoding the tracrRNA, ii) a second regulatory element operably linked to a nucleotide sequence encoding the crRNA and the tracr RNA, or iii) a second regulatory element operably linked to a nucleotide sequence encoding a guide sequence.

[0024] In some embodiments, the nucleotide sequence encoding the Cas protein is codon optimized for expression in a eukaryotic cell. In some embodiments, the one or more vectors comprise one or more viral vectors. In some embodiments, the one or more vectors comprise one or more retroviral, lentiviral, adenoviral, adeno-associated or herpes simplex viral vectors.

[0025] In another aspect, the present disclosure provides a delivery system configured to deliver an engineered Cas protein having reduced immunogenicity compared to a naturally occurring Cas protein and one or more nucleic acid components of a composition comprising: a) the engineered Cas protein, and b) i) a crRNA comprising a) a 5′ guide sequence designed to hybridize to a target DNA sequence, and b) a 3′ direct repeat sequence, and ii) a tracr RNA, or a guide, whereby there is formed a CRISPR complex comprising the Cas protein complexed with the crRNA and the tracr RNA, or the guide.

[0026] In some embodiments, the Cas protein is a Type II, Type V, or Type VI Cas protein. In some embodiments, the Cas protein is Cas9, Cas12, or Cas13. In some embodiments, the delivery system comprises one or more vectors or one or more polynucleotide molecules, the one or more vectors or polynucleotide molecules comprising one or more polynucleotide molecules encoding the Cas protein and one or more nucleic acid components of the non-naturally occurring or engineered composition. In some embodiments, the delivery system comprises a delivery vehicle comprising liposome(s), particle(s), exosome(s), microvesicle(s), a gene-gun or one or more viral vector(s).

[0027] In another aspect, the present disclosure provides an engineered Cas protein which comprises at least one mutated T cell epitope, wherein the T cell epitope has reduced immunogenicity as compared to the corresponding T cell epitope of a naturally occurring Cas protein, whereby the engineered Cas protein comprises reduced immunogenicity as compared to the naturally occurring Cas protein.

[0028] In some embodiments, the Cas protein is wherein the Cas protein is a Type II, Type V, or Type VI Cas protein. In some embodiments, the Cas protein is Cas9, Cas12, or Cas13. In some embodiments, the immunogenicity of the T cell epitope is measured in silico. In some embodiments, the immunogenicity of the Cas protein is measured in a host.

[0029] In another aspect, the present disclosure provides a method of modifying a target nucleic acid, the method comprising contacting the target DNA with one or more engineered compositions comprising: a) an engineered Cas protein herein, having reduced immunogenicity compared to a naturally occurring Cas protein, b i) a crRNA comprising a) a guide sequence designed to hybridize to the target DNA sequence, and b) a direct repeat sequence, and ii) optionally a tracr RNA, or a guide, whereby there is formed a CRISPR complex comprising the Cas protein complexed with the crRNA and, optionally, with the tracr RNA, or the guide, wherein the guide sequence directs sequence-specific binding to the target DNA sequence in a cell, whereby expression of the target locus of interest is modified.

[0030] In some embodiments, modifying expression of the target gene comprises cleaving the target nucleic acid. In some embodiments, modifying expression of the target gene comprises increasing or decreasing expression of the target nucleic acid. In some embodiments, the target nucleic acid is DNA or RNA. In some embodiments, the target gene is in a prokaryotic cell. In some embodiments, the target gene is in a eukaryotic cell. In some embodiments, the target gene is in a mammalian cell or a human cell.

[0031] In another aspect, the present disclosure provides a cell comprising a modified target of interest, wherein the target of interest has been modified according to the method herein.

[0032] In another aspect, the present disclosure provides a method of modifying a target DNA in a mammal, which comprises delivering the system herein. In some embodiments, the mammal is a human, a non-human primate, a canine, a feline, an bovine, a porcine, an ovine, a rat, a mouse. In some embodiments, the method further comprises inducing tolerance to the Cas protein.

[0033] In another aspect, the present disclosure provides an engineered composition for site directed base editing comprising a targeting domain and a adenosine or cytidine deaminase, wherein the deaminase has reduced immunogenicity compared to a naturally occurring deaminase.

[0034] In some embodiments, the deaminase comprises at least one T cell epitope mutation. In some embodiments, the mutation comprises an insertion, deletion, or substitution. In some embodiments, the composition further comprises a mutation of the targeting domain that reduces immunogenicity. In some embodiments, the targeting domain is an oligonucleotide binding domain. In some embodiments, the deaminase, or catalytic domain thereof, comprises one or more mutations that increase activity or specificity of the adenosine deaminase relative to wild type. In some embodiments, the deaminase comprises one or more mutations that changes the functionality of the deaminase relative to wild type, preferably an ability of the deaminase to deaminate cytidine. In some embodiments, the targeting domain is a CRISPR system comprising a Cas protein, or fragment thereof which retains DNA and/or RNA binding ability, and a guide molecule. In some embodiments, the CRISPR system is catalytically inactive. In some embodiments, the CRISPR system comprises an RNA-binding protein, preferably Cas13, preferably the Cas13 protein is Cas13a, Cas13b or Cas13c, preferably wherein said Cas13 comprises a Cas13 listed in any of Tables 4, 5, or 6 or is from a bacterial species listed in any of Tables 4, 5, or 6, preferably wherein said Cas13 protein comprises Prevotella sp. P5-125 Cas13b, Porphyromas gulae Cas13b, or Riemerella anatipestifer Cas13b; preferably Prevotella sp. P5-125 Cas13b.

[0035] In some embodiments, the guide molecule comprises a guide sequence is capable of hybridizing with a target RNA sequence comprising an Adenine to form an RNA duplex, wherein said guide sequence comprises a non-pairing Cytosine at a position corresponding to said Adenine resulting in an A-C mismatch in the RNA duplex formed. In some embodiments, the Cas13 protein is a Cas13a protein and said Cas13a comprises one or more mutations the two HEPN domains, particularly at position R474 and R1046 of Cas13a protein originating from Leptotrichia wadei or amino acid positions corresponding thereto of a Cas13a ortholog, or wherein said Cas13 protein is a Cas13b protein and said Cas13b comprises a mutation in one or more of positions R116, H121, R1177, H1182, preferably R116A, H121A, R1177A, H1182A of Cas13b protein originating from Bergeyella zoohelcum ATCC 43767 or amino acid positions corresponding thereto of a Cas13b ortholog, or wherein said Cas13 protein is a Cas13b protein and said Cas13b comprises a mutation in one or more of positions R128, H133, R1053, H1058, preferably H133 and H1058, preferably H133A and H1058A, of a Cas13b protein originating from Prevotella sp. P5-125 or amino acid positions corresponding thereto of a Cas13b orthologs. In some embodiments, the Cas13, preferably Cas13b, is truncated, preferably C-terminally truncated, preferably wherein said Cas13 is a truncated functional variant of the corresponding wild type Cas13, optionally wherein said truncated Cas13b is encoded by nt 1-984 of Prevotella sp. P5-125 Cas13b or the corresponding nt of a Cas13b orthologue or homologue. In some embodiments, the guide molecule comprises a guide sequence is capable of hybridizing with a target RNA sequence comprising a Cytidine to be edited to form an RNA duplex. In some embodiments, the guide sequence has a length of about 20-53 nt, preferably 25-53 nt, more preferably 29-53 nt or 40-50 nt capable of forming said RNA duplex with said target sequence, and/or wherein the distance between said non-pairing C and the 5′ end of said guide sequence is 20-30 nucleotides. In some embodiments, the guide sequence comprises more than one mismatch corresponding to different adenosine sites in the target RNA sequence or wherein two guide molecules are used, each comprising a mismatch corresponding to a different adenosine sites in the target RNA sequence. In some embodiments, the cytidine deaminase protein or catalytic domain thereof is fused to a N- or C-terminus of said oligonucleotide binding protein, optionally by a linker, preferably where said linker is (GGGGS)3-11, GSG5, or LEPGEKPYKCPECGKSFSQSGALTRHQRTHTR, or wherein said linker is an XTEN, linker. In some embodiments, the cytidine deaminase protein or catalytic domain thereof is inserted into an internal loop of said dead Cas13 protein. In some embodiments, the cytidine deaminase protein or catalytic domain thereof is linked to an adaptor protein and said guide molecule or said dead Cas13 protein comprises an aptamer sequence capable of binding to said adaptor protein, preferably wherein said adaptor sequence is selected from MS2, PP7, Qβ, F2, GA, fr, JP501, M12, R17, BZ13, JP34, JP500, KU1, M11, MX1, TW18, VK, SP, FI, ID2, NL95, TW19, AP205, ϕCb5, ϕCb8r, ϕCb12r, ϕCb23r, 7s and PRR1. In some embodiments, the targeting domain and optionally said cytodine deaminase or catalytic domain thereof comprise one or more heterologous nuclear export signal(s) (NES(s)) or nuclear localization signal(s) (NLS(s)), preferably an HIV Rev NES or MAPK NES, preferably C-terminal.

[0036] In some embodiments, the Cas13 protein is truncated at a C terminus, an N terminus, or both. In some embodiments, the Cas13 is truncated by at least 20, at least 40, at least 60, at least 80, at least 100, at least 120, at least 140, at least 160, at least 180, at least 200, at least 220, at least 240, at least 260, or at least 300 amino acids on the C terminus. In some embodiments, the Cas13 is truncated by at least 20, at least 40, at least 60, at least 80, at least 100, at least 120, at least 140, at least 160, at least 180, at least 200, at least 220, at least 240, at least 260, or at least 300 amino acids on the N terminus. In some embodiments, the truncated form of the Cas13 effector protein has been truncated at C-terminal Δ984-1090, C-terminal Δ1026-1090, C-terminal Δ1053-1090, C-terminal Δ934-1090, C-terminal Δ884-1090, C-terminal Δ834-1090, C-terminal Δ784-1090, or C-terminal Δ734-1090, wherein amino acid positions of the truncations correspond to amino acid positions of Prevotella sp. P5-125 Cas13b protein. In some embodiments, the truncated form of the Cas13 effector protein has been truncated at C-terminal A795-1095, wherein amino acid positions of the truncation correspond to amino acid positions of Riemerella anatipestifer Cas13b protein. In some embodiments, the truncated form of the Cas13 effector protein has been truncated at C-terminal Δ 875-1175, C-terminal Δ 895-1175, C-terminal Δ 915-1175, C-terminal Δ 935-1175, C-terminal Δ 955-1175, C-terminal Δ 975-1175, C-terminal Δ 995-1175, C-terminal Δ 1015-1175, C-terminal Δ 1035-1175, C-terminal Δ 1055-1175, C-terminal Δ 1075-1175, C-terminal Δ 1095-1175, C-terminal Δ 1115-1175, C-terminal Δ 1135-1175, C-terminal Δ 1155-1175, wherein amino acid positions correspond to amino acid positions of Porphyromonas gulae Cas13b protein. In some embodiments, the truncated form of the Cas13 effector protein has been truncated at N-terminal Δ1-125, N-terminal Δ 1-88, or N-terminal Δ 1-72, wherein amino acid positions of the truncations correspond to amino acid positions of Prevotella sp. P5-125 Cas13b protein. In some embodiments, the adenosine deaminase is modified to convert activity to a cytidine deaminase. In some embodiments, the adenosine deaminase is modified by one or more mutations at one or more positions selected from E396, C451, V351, R455, T375, K376, S486, Q488, R510, K594, R348, G593, S397, H443, L444, Y445, F442, E438, T448, A353, V355, T339, P539, V525 and 1520. In some embodiments, the adenosine deaminase is mutated at one or more positions selected from E488, V351, S486, T375, S370, P462, and N597. In some embodiments, the adenosine deaminase comprises one or more mutations selected from E488Q, V351G, S486A, T375S, S370C, P462A, and N597I.

[0037] In some embodiments, the adenosine deaminase protein or catalytic domain thereof is a human, cephalopod, or Drosophila adenosine deaminase protein or catalytic domain thereof. In some embodiments, the adenosine deaminase protein or catalytic domain thereof has been modified to comprise a mutation at glutamic acid488 of the hADAR2-D amino acid sequence, or a corresponding position in a homologous ADAR protein. In some embodiments, the glutamic acid residue at position 488 or a corresponding position in a homologous ADAR protein is replaced by a glutamine residue (E488Q). In some embodiments, the adenosine deaminase protein or catalytic domain thereof is a mutated hADAR2d comprising mutation E488Q or a mutated hADAR1d comprising mutation E1008Q. In some embodiments, the targeting domain is a catalytically inactive Cas13 protein, or a nucleotide sequence encoding said catalytically inactive Cas13 protein. In some embodiments, the catalytically inactive Cas13 protein is catalytically inactive Cas13a, catalytically inactive Cas13b, or catalytically inactive Cas13c. In some embodiments, the catalytically inactive Cas13 protein is obtained from a Cas13 nuclease derived from a bacterial species selected from the group consisting of the bacterial species listed in any of Tables 4, 5, or 6.

[0038] These and other aspects, objects, features, and advantages of the example embodiments will become apparent to those having ordinary skill in the art upon consideration of the following detailed description of illustrated example embodiments.

### DETAILED DESCRIPTION OF THE EXAMPLE EMBODIMENTS

### General Definitions

[0039] Unless defined otherwise, technical and scientific terms used herein have the same meaning as commonly understood by one of ordinary skill in the art to which this disclosure pertains. Definitions of common terms and techniques in molecular biology may be found in Molecular Cloning: A Laboratory Manual, 2^{nd} edition (1989) (Sambrook, Fritsch, and Maniatis); Molecular Cloning: A Laboratory Manual, 4^{th} edition (2012) (Green and Sambrook); Current Protocols in Molecular Biology (1987) (F. M. Ausubel et al. eds.); the series Methods in Enzymology (Academic Press, Inc.): PCR 2: A Practical Approach (1995) (M. J. MacPherson, B. D. Hames, and G. R. Taylor eds.): Antibodies, A Laboratory Manual (1988) (Harlow and Lane, eds.): Antibodies A Laboratory Manual, 2^{nd} edition 2013 (E. A. Greenfield ed.); Animal Cell Culture (1987) (R. I. Freshney, ed.); Benjamin Lewin, Genes IX, published by Jones and Bartlet, 2008 (ISBN 0763752223); Kendrew et al. (eds.), The Encyclopedia of Molecular Biology, published by Blackwell Science Ltd., 1994 (ISBN 0632021829); Robert A. Meyers (ed.), Molecular Biology and Biotechnology: a Comprehensive Desk Reference, published by VCH Publishers, Inc., 1995 (ISBN 9780471185710); Singleton et al., Dictionary of Microbiology and Molecular Biology 2nd ed., J. Wiley & Sons (New York, N.Y. 1994), March, Advanced Organic Chemistry Reactions, Mechanisms and Structure 4th ed., John Wiley & Sons (New York, N.Y. 1992); and Marten H. Hofker and Jan van Deursen, Transgenic Mouse Methods and Protocols, 2^{nd} edition (2011).

[0040] As used herein, the singular forms “a”, “an”, and “the” include both singular and plural referents unless the context clearly dictates otherwise.

[0041] The term “optional” or “optionally” means that the subsequent described event, circumstance or substituent may or may not occur, and that the description includes instances where the event or circumstance occurs and instances where it does not.

[0042] The recitation of numerical ranges by endpoints includes all numbers and fractions subsumed within the respective ranges, as well as the recited endpoints.

[0043] The terms “about” or “approximately” as used herein when referring to a measurable value such as a parameter, an amount, a temporal duration, and the like, are meant to encompass variations of and from the specified value, such as variations of +/−10% or less, +/−5% or less, +/−1% or less, and +/−0.1% or less of and from the specified value, insofar such variations are appropriate to perform in the disclosed invention. It is to be understood that the value to which the modifier “about” or “approximately” refers is itself also specifically, and preferably, disclosed.

[0044] As used herein, a “biological sample” may contain whole cells and/or live cells and/or cell debris. The biological sample may contain (or be derived from) a “bodily fluid”. The present invention encompasses embodiments wherein the bodily fluid is selected from amniotic fluid, aqueous humor, vitreous humor, bile, blood serum, breast milk, cerebrospinal fluid, cerumen (earwax), chyle, chyme, endolymph, perilymph, exudates, feces, female ejaculate, gastric acid, gastric juice, lymph, mucus (including nasal drainage and phlegm), pericardial fluid, peritoneal fluid, pleural fluid, pus, rheum, saliva, sebum (skin oil), semen, sputum, synovial fluid, sweat, tears, urine, vaginal secretion, vomit and mixtures of one or more thereof. Biological samples include cell cultures, bodily fluids, cell cultures from bodily fluids. Bodily fluids may be obtained from a mammal organism, for example by puncture, or other collecting or sampling procedures.

[0045] The terms “subject,” “individual,” and “patient” are used interchangeably herein to refer to a vertebrate, preferably a mammal, more preferably a human. Mammals include, but are not limited to, murines, simians, humans, farm animals, sport animals, and pets. Tissues, cells and their progeny of a biological entity obtained in vivo or cultured in vitro are also encompassed.

[0046] The term “exemplary” is used herein to mean serving as an example, instance, or illustration. Any aspect or design described herein as “exemplary” is not necessarily to be construed as preferred or advantageous over other aspects or designs. Rather, use of the word exemplary is intended to present concepts in a concrete fashion.

[0047] The terms “Cas enzyme”, “CRISPR enzyme”, “CRISPR protein”, “Cas protein”, “CRISPR-Cas enzyme”, “CRISPR-Cas protein”, “CRISPR-Cas effector protein”, “CRISPR-Cas effector”, “CRISPR effector protein”, and “Cas effector protein” are generally used interchangeably and at all points of reference herein refer by analogy to Cas proteins further described in this application.

[0048] Various embodiments are described hereinafter. It should be noted that the specific embodiments are not intended as an exhaustive description or as a limitation to the broader aspects discussed herein. One aspect described in conjunction with a particular embodiment is not necessarily limited to that embodiment and can be practiced with any other embodiment(s). Reference throughout this specification to “one embodiment”, “an embodiment,” “an example embodiment,” means that a particular feature, structure or characteristic described in connection with the embodiment is included in at least one embodiment of the present invention. Thus, appearances of the phrases “in one embodiment,” “in an embodiment,” or “an example embodiment” in various places throughout this specification are not necessarily all referring to the same embodiment, but may. Furthermore, the particular features, structures or characteristics may be combined in any suitable manner, as would be apparent to a person skilled in the art from this disclosure, in one or more embodiments. Furthermore, while some embodiments described herein include some but not other features included in other embodiments, combinations of features of different embodiments are meant to be within the scope of the invention. For example, in the appended claims, any of the claimed embodiments can be used in any combination.

[0049] All publications, published patent documents, and patent applications cited herein are hereby incorporated by reference to the same extent as though each individual publication, published patent document, or patent application was specifically and individually indicated as being incorporated by reference.

### Overview

[0050] The present disclosure provides engineered or non-naturally occurring Cas proteins with reduced immunogenicity compared to wildtype counterpart, and methods of screening and use thereof. It is provided herein that Cas proteins can be deimmunized without significantly altering activity, including but not limited to nucleic acid binding, complex formation, target binding, and target cleavage. In particular, analyses of Cas proteins are provided to identify MHC I and MHC II binding regions. Mutations can be made in various regions of the Cas proteins to reduce immunogenicity of the protein. The mutations may be combined in the same protein to further reduce immunogenicity.

[0051] In one aspect, embodiments disclosed herein are directed to engineered Cas proteins that comprise at least one modification (compared to an unmodified Cas protein) that reduces immunogenicity of the engineered proteins, complexes, and systems. The modification may enhance binding of the of the CRISPR complex to the binding site and/or alters editing preference as compared to a wild type counterpart. In certain example embodiments, the Cas proteins is class 2 Cas proteins, such as Type II, Type V, or Type VI Cas proteins.

[0052] In another aspect, the present disclosure provides methods of reducing immunogenicity of a Cas protein. The method may comprise introducing one or more modifications in the Cas protein. The modification may mutate one or more epitopes of immune cells (e.g., T cells).

[0053] In another aspect, embodiments disclosed herein are directed to viral vectors for delivery of the engineered Cas proteins. In certain example embodiments, the vectors are designed so as to allow packaging of the Cas protein within a single vector. There is also an increased interest in the design of compact promoters for packing and thus expressing larger transgenes for targeted delivery and tissue-specificity. Thus, in another aspect, certain embodiments disclosed herein are directed to delivery vectors, constructs, and methods of delivering larger genes for systemic delivery.

[0054] In another aspect, the present invention relates to methods for developing or designing CRISPR-Cas systems. In an aspect, the present invention relates to methods for developing or designing optimized CRISPR-Cas systems a wide range of applications including, but not limited to, therapeutic development, bioproduction, and plant and agricultural applications. The present invention in particular relates to methods for improving CRISPR-Cas systems, such as CRISPR-Cas system based therapy or therapeutics. Key characteristics of successful CRISPR-Cas systems, such as CRISPR-Cas system based therapy or therapeutics involve high specificity, high efficacy, and high safety. High specificity and high safety can be achieved among others by reduction of off-target effects. Improved specificity and efficacy likewise may be used to improve applications in plants and bioproduction.

[0055] The methods herein involve optimization of selected parameters or variables associated with the CRISPR-Cas system and/or its functionality, as described herein further elsewhere. Optimization of the CRISPR-Cas system in the methods as described herein may depend on the target(s), such as the therapeutic target or therapeutic targets, the mode or type of CRISPR-Cas system modulation, such as CRISPR-Cas system based therapeutic target(s) modulation, modification, or manipulation, as well as the delivery of the CRISPR-Cas system components. One or more targets may be selected, depending on the genotypic and/or phenotypic outcome. For instance, one or more therapeutic targets may be selected, depending on (genetic) disease etiology or the desired therapeutic outcome. The (therapeutic) target(s) may be a single gene, locus, or other genomic site, or may be multiple genes, loci or other genomic sites. As is known in the art, a single gene, locus, or other genomic site may be targeted more than once, such as by use of multiple gRNAs.

[0056] CRISPR-Cas system activities may involve target disruption, such as target mutation, such as leading to gene knockout, replacement of particular target sites, such as leading to target correction, removal of particular target sites, such as leading to target deletion, modulation of target site functionality, such as target site activity or accessibility, leading for instance to (transcriptional and/or epigenetic) gene or genomic region activation or gene or genomic region silencing. The skilled person will understand that modulation of target site functionality may involve Cas protein mutation (such as for instance generation of a catalytically inactive Cas protein) and/or functionalization (such as for instance fusion of the Cas protein with a heterologous functional domain, such as a transcriptional activator or repressor), as described herein elsewhere.

### Reduction of Immunogenicity

[0057] The present disclosure provides methods of reducing immunogenicity and engineered proteins (e.g., Cas proteins) with reduced immunogenicity. In general, immunogenicity of a protein may be reduced by modifying one or more epitopes of immune cells on the protein. The epitopes may be T cell epitopes. As used herein, the term “deimmunized” or “reducing immunogenicity”, when used in reference to CRISPR, relates to Cas proteins (e.g., Cas9, Cas12a, Cas12b, Cas13, orthologs, mutants, truncations and other variants), wherein the specific removal and/or modification of highly immunogenic regions or residues has occurred. Removal means removal of the immunogenic epitope, which can occur by deletion, insertion, or substitution of amino acids and/or changes in glycosylation. Exemplary approaches of deimmunizing or reducing immunogenicity has been employed for the removal of T-cell epitopes from therapeutic molecules including antibodies (See, e.g., WO 98/52976 or WO 00/343170).

### Epitopes and Methods of Identification

### T Cell Epitopes

[0058] T cell epitopes include short amino acid sequences that are recognized by T-cells in the context of MHC class I and/or class II molecules. The immunogenicity of a specific T cell epitope is a function of a combination of factors, including, for example, intracellular antigen processing, peptide binding to MHC molecules, and recognition of the peptide complexed with the MHC by the relevant T cell receptor. Because MHC-peptide binding is a key step in determining the repertoire of peptides that will be presented to the T cell, identification of peptides (also referred to as HLA ligands) that bind to MHC molecules can be used to identify candidate T cell epitopes.

[0059] As noted above, thousands of MHC peptide ligands have been identified. The peptide sequence can be displayed as a sequence logo, a useful tool for visual display of conservation and variability in multiple sequence alignments. Useful sequence logo applications for T cell epitopes as well as exemplary HLA-A peptide motifs are described in Olson, L. R., et al., “Blocklogo: visualization of peptide and sequence motif conservation.” J, Immunol. Methods 2013 Dec. 31; 400-401:37-44. Hierarchical clustering of HLA-A, HLA-B, and HLA-C alleles based on their binding specificity to particular motifs is shown in Gfeller, D. et al., “Predicting Antigen Presentation-What Could We Learn From a Million Peptides?” Front Immunol. 2018; 9: 1716. Exemplary MHC Class II peptide ligands are described, for example, in Barra C. I. et al., “Footprints of antigen processing boost MHC class II natural ligand predictions.” Genome Med. 2018 Nov. 16; 10(1):84.

[0060] Epitopes that bind to MHC molecules may be identified by two general approaches: in vitro binding data or mass spectrometry (MS) measurements of eluted MHC binding peptides. The in vitro approach involves testing chemically synthesized peptides in biochemical or cell-based assays for specific binding to MHC molecules. Immunogenic T cell epitopes in a CRISPR polypeptide or fragment thereof can be identified using such in vitro assays. Exemplary methods for identifying peptide ligands that bind HLA Class I molecules include, without limitation, refolding assays using conformational pan HLA-I antibodies to test whether the HLA-I complex is properly folded in the presence of a peptide; peptide-rescuing assays based on a photo-cleavable peptide that is stripped by UV radiation in the presence of another peptide; competitive binding assays with radiolabeled to determine relative affinity, that is; the IC50; dissociation assays based on radiolabeled β2m to probe the stability of peptide-HLA-I complexes; and surface plasmon resonance techniques to measure actual Kd values. Exemplary methods for identifying peptide ligands that bind to HLA Class II include high throughput screening with peptide microarrays, phage display, or yeast display. Additional assays include peptide threading, ELISPOT assays, and functional assays, for example, analysis of cytokine expression patterns.

[0061] The MS approach relies on immunoaffinity purification of HLA complexes from cell lysates followed by extraction of the bound peptides. Immunogenic T cell epitopes in a CRISPR polypeptide or fragment thereof can be identified using MS analysis. The extracted peptides are separated by HPLC and analyzed by mass spectrometry (MS). The resulting spectra are compared with in silico generated spectra of peptides from protein sequence databases with MS search tools. The MS approach provides a comprehensive picture of the entire repertoire of naturally occurring HLA ligands. An exemplary MS profiling method is described in Abelin, J. G. et al., “Mass Spectrometry Profiling of HLA-Associated Peptidomes in Mono-allelic Cells Enables More Accurate Epitope Prediction.” Immunity. 2017 Feb. 21; 46(2):315-326.

[0062] Immunogenic T cell epitopes in a CRISPR polypeptide or a fragment thereof can be identified using an epitope prediction tool. See, for example, Sanchez-Trincado et al., “Fundamentals and Methods for T- and B-Cell Epitope Prediction,” J. Immunol. Res. 2017; 2017: 2680160. Published online 2017 Dec. 28. Such methods fall into two general categories: structure based methods that rely on modeling the peptide-MHC structure and data-driven methods that rely on peptide sequences that are known to bind to MHC molecules. Sanchez-Trincado et al., list epitope prediction tools that rely on a variety of methods including structure-based tools (SB); sequence motifs (SM); motif matrices (MM); quantitative structure-activity relationship models (QSAR); quantitative affinity matrices (QAM); support vector machines (SVM); artificial neural networks (ANN) and combinations of these methods.

[0063] Epitope prediction tools that are useful for predicting MHC Class I epitopes in CRISPR polypeptide or fragment thereof include, for example MAPP (See e.g., Hakenberg J. et al., “MAPPP: MHC class I antigenic peptide processing prediction.” Applied Bioinformatics. 2003; 2(3):155-158.); PEPVAC (See e.g., Reche et al., space “PEPVAC: a web server for multi-epitope vaccine development based on the prediction of supertypic MHC ligands.” Nucleic Acids Research. 2005; 33 (Supplement 2):W138-W142); EPISOPT (See e.g., Molero-Abraham M. et al., “Selection of conserved epitopes from hepatitis C virus for pan-populational stimulation of T-cell responses.” Clinical and Developmental Immunology. 2013; 2013: 10); BIMAS (See e.g., Parker K. C. et al., “Scheme for ranking potential HLA-A2 binding peptides based on independent binding of individual peptide side-chains.” The Journal of Immunology. 1994; 152 (1):163-175; Propred-1 (See e.g., Singh H. et al., “ProPredl: prediction of promiscuous MHC class-I binding sites.” Bioinformatics. 2003; 19(8):1009-1014.); EpiJen (See e.g., Doytchinova I. A. et al., “EpiJen: a server for multistep T cell epitope prediction.” BMC Bioinformatics. 2006; 7(1):p. 131); IEDB-MHCI (See e.g., Zhang Q. et al., “Immune epitope database analysis resource (IEDB-AR)” Nucleic Acids Research. 2008; 36(Web Server issue):W513-W518); NetMHC (See e.g., Nielsen M. et al., “Reliable prediction of T-cell epitopes using neural networks with novel sequence representations.” Protein Science. 2003; 12(5):1007-1017); NetMHCpan (See e.g., Nielsen M. et al., “NetMHCpan, a method for quantitative predictions of peptide binding to any HLA-A and -B locus protein of known sequence.” PLoS One. 2007; 2(8, article e796)); nHLApred (See e.g., Bhasin M. et al., “A hybrid approach for predicting promiscuous MHC class I restricted T cell epitopes.” Journal of Biosciences. 2007; 32(1):31-42); NetCTL (See e.g., Larsen M. V. et al., “An integrative approach to CTL epitope prediction: a combined algorithm integrating MHC class I binding, TAP transport efficiency, and proteasomal cleavage predictions.” European Journal of Immunology. 2005; 35(8):2295-2303); and WAPP (See e.g., Donnes P. et al., “Integrated modeling of the major events in the MHC class I antigen processing pathway.” Protein Science. 2005; 14 (8):2132-2140).

[0064] Epitope prediction tools that are useful for predicting MHC Class II epitopes in a CRISPR polypeptide or fragment thereof include, for example, EpiDOCK (See e.g., Atanasova M. et al., “EpiDOCK: a molecular docking-based tool for MHC class II binding prediction.” Protein Engineering, Design and Selection. 2013; 26(10):631-634); PREDIVAC (See e.g., Oyarzun P. et al., “PREDIVAC: CD4+ T-cell epitope prediction for vaccine design that covers 95% of HLA class II DR protein diversity.” BMC Bioinformatics. 2013; 14(1):p. 52.); EpiTOP (See e.g., Dimitrov I. et al., “EpiTOP—a proteochemometric tool for MHC class II binding prediction.” Bioinformatics. 2010; 26(16):2066-2068); TEPITOPE (See e.g., Sturniolo T., et al. “Generation of tissue-specific and promiscuous HLA ligand databases using DNA microarrays and virtual HLA class II matrices.” Nature Biotechnology. 1999; 17(6):555-561); Proped (See e.g., Singh H. et al., “ProPred: prediction of HLA-DR binding sites.” Bioinformatics. 2001; 17(12):1236-1237); IEDB-MHCII (See e.g., Zhang Q. et al., “Immune epitope database analysis resource (IEDB-AR)” Nucleic Acids Research. 2008; 36(Web Server issue):W513-W518); IL4pred (See e.g., Dhanda S. K. et al., “Prediction of IL4 inducing peptides.” Clinical and Developmental Immunology. 2013; 2013:9); MHC2PRED (See e.g., Bhasin M. et al., “SVM based method for predicting HLA-DRB1*0401 binding peptides in an antigen sequence.” Bioinformatics. 2004; 20(3):421-423); NetMHCII (See e.g., Nielsen M. et al., “Prediction of MHC class II binding affinity using SMM-align, a novel stabilization matrix alignment method.” BMC Bioinformatics. 2007; 8(1):p. 238); and NetMHCIIpan (See e.g., Nielsen M., et al. “Quantitative predictions of peptide binding to any HLA-DR molecule of known sequence: NetMHCIIpan.” PLoS Computational Biology. 2008; 4(7)).

[0065] Epitope prediction tools that are useful for predicting either MHC Class I or MHC Class II epitopes in a CRISPR polypeptide or fragment thereof include, for example, MotifScan (See e.g., www.hiv.lanl.gov/content/immunology/motif_scan/motif_scan.); Rankpep (See e.g., Reche P. A., et al., “Enhancement to the RANKPEP resource for the prediction of peptide binding to MHC molecules using profiles.” Immunogenetics. 2004; 56(6):405-419.); SYFPEITHI (See e.g., Rammensee H. G. et al., “SYFPEITHI: database for MHC ligands and peptide motifs.” Immunogenetics. 1999; 50(3-4):213-219); Vaxign (See e.g., He Y. et al., “Vaxign: the first web-based vaccine design program for reverse vaccinology and applications for vaccine development.” Journal of Biomedicine and Biotechnology. 2010; 2010:15); MHCPred (See e.g., Guan P. et al., “MHCPred: a server for quantitative prediction of peptide-MHC binding.” Nucleic Acids Research. 2003; 31(13):3621-3624); MULTIPRED2 (See e.g., Zhang G. L. Et al., “MULTIPRED2: a computational system for large-scale identification of peptides predicted to bind to HLA supertypes and alleles.” Journal of Immunological Methods. 2011; 374(1-2):53-61); SVMHC (See e.g., Donnes P. et al., “Prediction of MHC class I binding peptides, using SVMHC.” BMC Bioinformatics. 2002; 3(1):p. 25); and SVRMHC (See e.g., Liu W. et al., “Quantitative prediction of mouse class I MHC peptide binding affinity using support vector machine regression (SVR) models.” BMC Bioinformatics. 2006; 7(1):p. 182).

[0066] Alternatively, or in addition, MHC Class I binding specificity can be analyzed using allele-specific predictors, either by using simple sequence motifs e.g., xLxxxxxx(L/V) for HLA-A02:01) or Position Weight Matrices (PWM) or with machine learning frameworks such as neural networks, hidden Markov Models, support vector machines, or convolutional neural networks. The machine learning models have the capacity to consider potential correlations between different positions within HLA-I ligands. (See e.g., Gfeller, D. et al., “Predicting Antigen Presentation—What Could We Learn From a Million Peptides?” Front Immunol. 2018; 9: 1716.)

[0067] Experimental ligands/peptides are available for only about 100 HLA-I alleles, so that the ligand specific predictors described above are useful only for a small fraction of the more than 12,000 HLA I alleles that have been identified to date. To identify additional ligands/peptides, “pan-allele predictors” can be used. For these methods, the input of the algorithm includes both the sequence of the ligand and the sequence of the HLA-I allele (or of its binding site). These algorithms can capture correlations between amino acids in the HLA-I-binding site and in the ligand. An exemplary pan-specific algorithm is the NetMHCpan tool. (See e.g., Jurtz V. et al., “NetMHCpan-4.0: improved peptide-MHC class I interaction predictions integrating eluted ligand and peptide binding affinity data.” J. Immunol (2017) 199:3360-8.10.4049) which includes several features specific for HLA-I molecules, such as combining peptides of different lengths in the training and incorporating peptide length preferences.

[0068] Useful ligand predictors for both allele specific and pan-allele analysis are summarized in Table 1 below (adapted from Gfeller, D. et al., “Predicting Antigen Presentation-What Could We Learn From a Million Peptides?” Front Immunol. 2018; 9: 1716; Sanchez-Trincado et al., “Fundamentals and Methods for T- and B-Cell Epitope Prediction,” J. Immunol. Res. 2017; 2017: 2680160.)

TABLE 1

| | Training | | | Allele | |
|---|---|---|---|---|---|
| Name | data | Output | Algorithm | coverage | Access |
| NetMHC4.0 | BA | BA | NN | S | www.cbs.dtu.dk/services/NetMHC/ |
| NetMHCpan4.0 | BA + MS | R (BA) | NN | Pan | www.cbs.dtu.dk/services/NetMHCpan-4.0/ |
| NetMHCII | BA + MS | R (BA) | NN | S | www.cbs.dtu.dk/services/NetMHCII/ |
| NetMHCIIpan | BA + MS | R (BA) | NN | Pan | www.cbs.dtu.dk/services/NetMHCIIpan/ |
| MixMHCpred | MS | R | PWM | S | github.com/GfellerLab/MixMHCpred |
| MHCflurry | BA | BA | NN | S | github.com/openvax/mhcflurry |
| PickPocket | BA | BA | PWM | Pan | www.cbs.dtu.dk/services/PickPocket/ |
| NetMHCstabpan | BS | BS | NN | Pan | www.cbs.dtu.dk/services/NetMHCstabpan/ |
| NetMHCstab | BS | BS | NN | S | www.cbs.dtu.dk/services/NetMHCstab/ |
| NetMHCcons | BA | BA | C | S | www.cbs.dtu.dk/services/NetMHCcons/ |
| IEDB consensus | BA | R | C | S | ools.iedb.org/mhci/ |
| SMMPMBEC | BA | R | PWM | S | github.com/ykimbiology/smmpmbec |
| MHCnuggets | BA | BA | NN | S | github.com/KarchinLab/mhcnuggets-2.0 |

(Abbreviations: BA, binding affinity; BS, binding stability; MS, HLA peptidomics data; R, ranking; NN, Neural network (including deep networks); PWM, position weight matrices; C, consensus; S, allele specific; Pan, pan-class I.)

[0069] MHC Class-II binding specificity can also be analyzed with machine learning frameworks. Modeling the binding specificity of MHC Class II alleles can be more challenging than modeling of MHC Class I alleles due to a number of factors, for example: 1) MHC Class II alleles tend to be more degenerate and less specific motifs; 2) MHC Class II molecules form dimers, resulting in more diversity, particularly where both members of a dimer or polymorphic; and 3) MHC Class II molecules tend to have greater conformational flexibility, which can be difficult to predict from short peptide sequences.

[0070] Useful Allele-specific HLA-II ligand predictors can include NetMHCII (See e.g., Jensen K. K. et al., “Improved methods for predicting peptide binding affinity to MHC class II molecules.” Immunology (2018) 154:394-406), ProPred (See e.g., Singh H. et al., “ProPred: prediction of HLA-DR binding sites.” Bioinformatics (2001) 17:1236-7.), MHCPred (See e.g., Guan P. et al., “MHCPred: a server for quantitative prediction of peptide-MHC binding.” Nucleic Acids Res (2003) 31:3621-4); TEPITOPE (See e.g., Sturniolo T. et al., “Generation of tissue-specific and promiscuous HLA ligand databases using DNA microarrays and virtual HLA class II matrices.” Nat Biotechnol (1999) 17:555-61.); and consensus methods (See e.g., Wang P., et al., “A systematic assessment of MHC class II peptide binding predictions and evaluation of a consensus approach.” PLoS Comput Biol (2008) 4:e1000048.). Pan-specific class II predictors typically include NetMHCIIpan (See e.g., Jensen K. K. et al., “Improved methods for predicting peptide binding affinity to MHC class II molecules.” Immunology (2018) 154:394-406).

### Adaptive Immunity

[0071] A modified Cas protein with reduced immunogenicity may trigger lower level of a response from the adaptive immune system compared to a unmodified counterpart Cas protein. The adaptive immune system, also referred to as the acquired immune system, is a complex multicellular system that encompasses both humoral immunity, mediated by B lymphocytes, and cell-mediated immunity, mediated by T lymphocytes. The adaptive immune system can recognize and destroy invading pathogens. In addition, the adaptive immune system can acquire an immunological memory as a result of exposure to a specific pathogen, resulting in an enhanced response during subsequent encounters with that particular pathogen.

[0072] Both B and T lymphocytes are derived from hematopoietic stem cells. T lymphocytes, also referred to as T cells, mature through the thymus and are generally identified by their expression of CD3 (which is associated with the T cell receptor) and either CD4 or CD8. Multiple T cell subtypes have been described. Effector cells encompass those cells that respond to a stimulus and include T helper cells (also referred to as T_{H} cells), cytotoxic T cells (also referred to as T_{C} cells, CTLs, and killer T cells), memory T cells; regulatory T cells (also referred to as T_{Reg}); natural killer T cells (NKT), mucosal invariant T cells (MAIT) and γδ T cells. CD8-expressing (or CD8+) T cells are principally involved with direct cell killing, or cytotoxicity. CD4+ T cells are primarily regulatory cells which stimulate and suppress immune responses as needed. T cells within the subtypes can also undergo further differentiation. For example, Tₕ cells can differentiate into including TH₁, TH₂, TH₃, TH₁₇, TH₉, or T_{FH} cells that each secrete different cytokines. Memory T cells can further differentiate into central memory T cells (TC_{M}), effector memory T cells (T_{EM} and TEM_{RA}) tissue resident memory T cells (T_{RM}) and virtual memory T cells

[0073] B lymphocytes also referred to as B cells, are characterized by their expression of CD19 or CD20, among other surface markers. B cells are responsible for antibody production. B cells are also effective antigen presenting cells.

[0074] Both T cells and B cells specifically bind to epitopes, also referred to as antigenic determinants. Epitopes generally are parts of larger molecules such as polypeptides, nucleic acids, or glycolipids.

### MHC

[0075] The modification of the Cas proteins may result in reduced binding and/or recognition of the Cas proteins by MHC. T cell recognition of antigens occurs via the T cell receptor (TCR), a specific receptor expressed on the surface of T cells. The T cell receptor binds to antigens when they are complexed with the major histocompatibility complex (MHC), a polypeptide assembly present on the surface of antigen presenting cells. In humans, the MHC is also referred to as human leukocyte antigen (HLA). In mice, the MHC is also referred to as the H-2 complex or H-2. The MHC encompasses a large multi gene family, which in humans is encoded by 21 genes, that is divided into three subgroups: Class I, Class II, and Class III. The MHC Class I and II function in antigen presentation. These two classes differ structurally and functionally.

[0076] Class I.

[0077] Class I polypeptides are primarily encoded by three genes, HLA-A, HLA-B, and HLA-C. These genes, which are expressed in nearly all human nucleated cells, are highly polymorphic and over 12,000 distinct alleles have been described. Specialized cell types can also express HLA-E, HLA-F, and HLA-G. Humans generally express different combinations of HLA-I alleles and so can express up to six different HLA-I polypeptides. The MHC Class I polypeptide is made up of an alpha chain comprising three domains (α1, α2, and α3). The MHC class I alpha chain functions in a noncovalent complex with a β2 microglobulin (β2m) polypeptide.

[0078] Functionally, the MHC Class I pathway processes and presents intracellular proteins, for example intracellular pathogens such as viruses and bacteria, for example Mycoplasma and Rickettsia. The intracellular proteins are degraded into peptides in the proteosome and the peptides are transported to the endoplasmic reticulum (ER) by the transporter associated with antigen processing (TAP), a protein complex that is a member of the ATP binding cassette transporter family. In the ER, the peptides bind to MHC Class I molecules that have been complexed with β2 microglobulin (β2m). The peptide-MHC Class I complexes are trafficked to the cell surface where they can be recognized by CD8 T cells.

[0079] Class II.

[0080] The MHC Class II polypeptides are encoded by HLA-DP (the α chain encoded by the HLA-DPA1 locus: the 3 chain encoded by the HLA-DPB1 locus); HDLA-DQ (the α chain encoded by the HLA-DQA1 locus; the 3 chain encoded by the HLA-DQB1 locus); HLA-DR (the α chain encoded by the HLA-DRA locus; the four 3 chains encoded by the HLA-DRB1, HLA-DRB3, HLA-DRB4, and HLA-DRB5 loci). Other MHC class II genes include HLA-DM, which encodes a polypeptide that catalyzes the loading of peptides onto HLA-II molecules, and HLA-DO, which encodes a polypeptide that catalyzes peptide exchange. The MHC Class II genes are also highly polymorphic. MHC Class II genes are typically expressed by professional antigen-presenting cells (APCs), macrophages, B cells, and dendritic cells (DCs), but can be conditionally expressed by all cell types. The MHC class II complex includes an α chain and a β chain, for example, HLA-DRA/HLA-DRB 1, 3, 4, 5; HLA-DPA1/HLA-DPB1; and HLA-DPA1/HLA-DPB1.

[0081] In contrast to the MHC Class I pathway, the MHC Class II pathway processes and presents extracellular antigens, for example, extracellular pathogens such as bacteria, viruses, and fungi. Extracellular antigens are taken into the cell by phagocytosis, where they are digested into peptides in lysosomes. Endogenous polypeptides can also be presented on HLA-II molecules if taken up by autophagy. The resulting peptide fragments are transported to endosomes where they bind to the HLA II receptor before transport to the cell surface.

[0082] Mhc Binding.

[0083] The MHC Class I and MHC Class II complexes have similar structures. Both have an antigen-binding groove composed of two alpha helices above a surface composed of eight anti-parallel beta strands. However, the structures of the binding grooves differ in ways that are relevant to peptide binding, also referred to as ligand binding or peptide ligand binding. The peptide binding groove of the MHC Class I complex is formed from a single alpha chain and so can only accommodate short peptides ranging from about 9 to about 11 amino acids. The N and the C-terminal ends of such peptides are hydrogen bonded to conserved residues of the MHC Class I molecule. The MHC Class I peptide binding groove also includes deep binding pockets having specific physicochemical preferences. Peptides of different sizes that bind to the same MHC Class I molecule can use different binding pockets. Generally, methods of predicting peptide MHC Class I binding rely on a fixed peptide length.

[0084] The peptide binding groove of the MHC Class II molecule is “open.” The binding groove accommodates a core peptide of 9 residues. But, the open configuration means that the N- and C-terminal ends of the peptide can extend beyond the binding groove, so that the MHC Class II bound peptides can vary in length and range from about nine to about 22 amino acids. The MHC Class II binding pocket is also shallower and less constrained, so that prediction can be less accurate than that obtained for MHC Class I.

[0085] The exact number of HLA alleles has yet to be determined. As of October 2018, the number of HLA Class I alleles was reported to be over 13,000, and the number of HLA Class II alleles was reported to be over 5000, the number of theoretical possible combinations of HLA Class II alleles is estimated to be upwards of 50,000. (See e.g., the IMGT-HLA database www.ebi.ac.uk/ipd/imgt/hla/). The HLA allelic variants bind to different sets of peptides. Thousands of peptide ligands have been described for the most frequent alleles, although many of the less frequent alleles remain unanalyzed.

### Other Exemplary Deimmunization Strategies

[0086] Methods that have been developed for the selection of candidate protein analogs with reduced HLA binding and immunogenicity can be used to identify candidate CRISPR polypeptide epitopes having reduced immunogenicity. (See e.g., Dhanda et al., “Development of a strategy and computational application to select candidate protein analogues with reduced HLA binding and immunogenicity.” Immunology (2018) 153:118-132.) Dhanda et al., describe a three-step strategy for reducing immunogenicity of HLA-II epitopes. The method relied on the publicly available Immune Epitope Database (IEDB tools.iedb.org/deimmunization/). In the first step, immunogenic peptides were predicted. In the second step, all possible variants of the immunogenic peptides having decreased binding affinities compared to the wild type sequences were identified. In the third step, all the sequences with predicted reduced binding were ranked according to their predicted effect on neighboring peptides. The third step reduces the likelihood that sequence alterations that decrease HLA binding capacity will not unintentionally create new epitopes in neighboring sequences.

[0087] Another platform that could be used to identify candidate CRISPR polypeptide epitopes having reduced immunogenicity is the EpiSweep suite of protein design algorithms. (See e.g., Choi, Y. et al., “EpiSweep: Computationally-driven Reengineering of Therapeutic Proteins to Reduce immunogenicity while Maintaining Function.” Methods Mol Biol. 2017; 1529: 375-398.

### Antigen Processing and Presentation

[0088] Antigen processing and presentation can also be integrated into methods to predict MHC epitopes. Cleavage site prediction tools and predictions of TAP transport can increase the predictability of peptide-MHC binding. See, for example, Sanchez-Trincado et al., “Fundamentals and Methods for T- and B-Cell Epitope Prediction,” J. Immunol. Res. 2017; 2017: 2680160. Published online 2017 Dec. 28 and Gfeller, D. et al., “Predicting Antigen Presentation-What Could We Learn From a Million Peptides?” Front Immunol. 2018; 9: 1716.

### Validation of Candidate T Cell Epitopes

[0089] Regardless of the method used to identify candidate T cell epitopes, such epitopes can be validated experimentally using in vitro or cell-based assays. A useful approach is described in Dhanda et al., “Development of a strategy and computational application to select candidate protein analogues with reduced HLA binding and immunogenicity.” Immunology (2018) 153:118-132.) Selected peptides can be tested for immunogenicity with human peripheral blood mononuclear cells (PBMCs) using a two week in vitro restimulation protocol followed by ELISPOT assays to measure the number of cells secreting interferon-γ or IL-5 in response to stimulation with the specific peptide.

### B Cell Epitopes

[0090] In some embodiments, a CRISPR polypeptide amino acid sequence can be analyzed to identify candidate B cell epitopes. B cell epitopes are short segments of about 5-10 amino acids in length. B cell epitopes can be potentially found on any solvent expose region of a polypeptide. A B cell epitope can be a linear epitope, also referred to a continuous epitope, comprising sequential amino acid residues. Alternatively, a B cell epitope can be a conformational epitope, also referred to as a discontinuous epitope, made up of solvent-exposed amino acids that are not always sequential, but are in close proximity in the three-dimensional confirmation of polypeptide. Most B cell epitopes are conformational and it is these conformational epitopes that are most relevant to strategies relating to reduction of immunogenicity.

[0091] B cell epitopes can be identified using a variety of experimental methods encompassing both structural and functional methods, including for example, x-ray crystallography, screening of antigen derived proteolytic fragments are peptides for antibody binding, and testing antigen-antibody reactivity of mutants. Computational methods of predicting B cell epitopes have also been described. Representative computational methods B cell epitope prediction have been described in Sanchez-Trincado et al., “Fundamentals and Methods for T- and B-Cell Epitope Prediction,” J. Immunol. Res. 2017; 2017: 2680160. Published online 2017 Dec. 28.

### T Cell Epitope Removal

[0092] Useful procedures for identification of T cell epitopes generally provide a measure of binding strength. Binding can be described, for example in terms of affinity or percentile ranking, and some algorithms may assign subjective labels such as “weak binding” and “strong binding” based on a selectable threshold number. In certain embodiments, predicted affinity may be ranked, for example compared to a set of random natural peptides. In certain embodiments, an epitope is selected for removal if its ranks in the top 0.1%, 0.2%, or 0.5%, or 1% as compared to the set of random peptides. In certain embodiments, the rankings are used as threshold values for strong binding peptides or weak binding peptides. For example, a threshold for strong binding can be 0.2%, 0.5%, or 1%, while a threshold for weak binding can be 1% or 2% or 5%. In certain embodiments, T cell epitopes in the top 10% or in the top 5% or in the top 2% are candidates for removal. In certain embodiments, T cell epitopes that are candidates bind to MHC or are calculated to bind to MHC with high affinities. In certain embodiments, affinity measures provide a cut off to distinguish binders from non-binders or from weak binders. Exemplary cutoffs for strong binders are 2 nM, 3 nM, 4 nM, 5 nM, 10 nM, 50 nM, or 100 nM. Exemplary cutoffs for weak binders are 50 nM, 100 nM, 200 nM, or 500 nM. In certain embodiments, it will be determined to remove the top 2% or the top 5% or the top 10% of peptides.

[0093] Deimmunization involves mutation of residues that are predicted, or otherwise determined to contribute to MHC binding. Individual amino acids or combinations of amino acids can be varied, by insertion, deletion, or substitution. Random selection of mutations including substitutions, insertions, or deletions, can be acceptable at some locations but at others can lead to disruption of proper folding and function. One approach is to incorporate point mutations found in sequences similar to the peptide to be mutated. Another approach is to interchange adjacent amino acids, which can have a large impact on MHC binding relative to changes in folding or function.

[0094] Generally, deimmunization allows for maintenance of function as only one or a few mutations will effectively reduce binding of MHC-peptide binding. Preserving function means a function is maintained at 50%, 75%, 90% or greater and may be increased compared to the unmutated CRISPR protein.

### Additional Exemplary Deimmunization Approaches

[0095] In some embodiments, CD4+ T cell responses to the Cas proteins may be measured by one or more assays. In some examples, the assays are performed using cultures of peripheral blood mononuclear cells (PBMCs), e.g., from 50 individual donors, with a distribution of HLA-DR allotypes (e.g., coverage and frequency) representing the human population of interest. T cell proliferation and IL-2 secretion, both markers of T cell activation, may be measured using 3H-thymidine incorporation and ELISpot, respectively. In some cases, strong correlation between these markers allows the detection of CD4+ effector T cell activation and discriminates between T cell effector and regulatory responses.

[0096] In some cases, dendritic cells (DCs) from the PBMCs are used. The DCs may be differentiated in vitro to an immature DC phenotype. These cells may then be loaded with the test protein or formulation before inducing further differentiation to a mature DC phenotype. Once matured, the cells may be incubated with autologous CD4+ T cells before measuring T cell proliferation and IL-2 secretion, both markers of T cell activation, using 3H-thymidine incorporation and ELISpot, respectively. In some cases, prescreen tests using a small numbers of donors can be performed to evaluate if there is direct modulation of T cell activation prior to choosing a time course.

[0097] In some embodiments, CD4+ T cell epitopes within the Cas protein sequences may be mapped to design deimmunized variants with a lower risk of immunogenicity. The location, number and magnitude of T cell epitopes in the Cas proteins may be determined. The information can be used to aid deimmunization and contributes to the reduction in risk of clinical immunogenicity.

[0098] In some exemplary CD4+ T cell epitope mapping assays, 15mer peptides with a 12 amino acid overlap are synthesized spanning the test sample sequence. Individual peptides may then be tested against CD8+ T cell-depleted PBMCs which contain APCs and CD4+ T cells at physiological ratios from 50 donors with >80% DRB1 allotypic coverage of the world population. Peptides may displace other peptides already bound to MHC class II or may be taken up by antigen-presenting cells such as dendritic cells which process the peptides and present them in the form of linear peptides bound in the groove of MHC class II. Binding of the T cell receptor to these MHC class II/peptide complexes by CD4+ T cells can trigger an activation cascade causing T cell proliferation. T cell activation may be determined by measuring T cell proliferation using ³H-thymidine uptake. Significant immunogenicity may be determined through predetermined statistical assessment of the dataset using the T-test to provide details on magnitude of T cell response based on stimulation index normalization against background/vehicle control. T cell epitopes may then be identified by comparing overlapping immunogenic peptides to identify the core T cell epitope sequence.

[0099] In some embodiments, MHC Class II bound peptides processed and presented by dendritic cells (DCs) from Cas proteins may be determined. Combined with ex vivo T cell epitope mapping assays, peptides may be identified that are recognized by CD4+ T cells with the potential to trigger an immune cascade, causing T cell proliferation and leading to anti-drug antibody formation. In some examples, CD14 positive mononuclear cells may be purified from PBMCs and differentiated into immature DCs using GMCSF and IL-4. iDCs may be loaded with test proteins and then matured with LPS. The DCs may take up and process the proteins, presenting them as linear peptides bound in the groove of MHC class II. After incubation with the test sample and LPS, the DCs may be lysed and MHC class II bound peptide complexes may be captured by immunoprecipitation using a pan-HLA-DR antibody. Naturally processed and presented peptides, from the test sample, may be eluted from the captured MHC molecules for subsequent analysis by nano-LC-MS/MS. The eluted peptides may be identified using a common search algorithm and an in-house database. Identified peptides may occur as different length variants. These variants may share the same core HLA-DR binding motif and effectively form a cluster.

[0100] Databases are available for screening and prediction of T cell epitopes in silico technologies. Examples of such databases include iTope and T Cell Epitope Database (TCED).

[0101] In some embodiments, the Cas proteins may be artificially stressed to induce the formation of sub-visible aggregates of different properties at quantities that may be present in clinical material (after storage and handling). The stressed proteins may be characterized with an orthogonal analytical approach and compared for their immunogenic potential in vitro.

[0102] In some embodiments, induction of cytokine production by immune cells in response to the Cas proteins may be determined. By profiling the type and quantity of cytokines induced in vitro, a picture can be established of whether the tested Cas protein induces an immune response. Depending on the anticipated mode of action of the product, an immune response may be unwanted or favorable.

[0103] Cas proteins may potentially activate innate and adaptive immune cells resulting in rapid and excessive cytokine release which can lead to cytokine release syndrome (CRS), sometimes referred to as cytokine storm. Elevated serum cytokine concentrations may be measurable in patients within minutes to hours of infusion of the product. A cytokine storm may result in significant and potentially life-threatening toxicity and patients feel very unwell. Assays may be performed to evaluate the risk of Cas proteins causing a cytokine storm. The assays can identify the risk prior to it being progressed into clinical development.

[0104] In some examples, an assay may use fresh whole human blood within 4 hours of blood draw, providing close proximity to the state of circulating cells in vivo. The assay may have sensitivity of cytokine detection that allows the measurement of changes in multiple cytokines, such as IL-6, IL-8, IL-10, IFN-γ and TNF-α, in parallel. Multiple reference proteins known to be associated with cytokine release-mediated clinical toxicity may be used to correlate the relative severity of the cytokine response induced by the tested Cas proteins. The assays may combine the quantity, type, and number of cytokines induced with the frequency of donor responses to create a composite picture of the relative risk of test compounds to induce a cytokine storm.

[0105] In some embodiments, Tregitopes (T regulatory epitopes) may be identified and introduced to Cas proteins to reduce immunogenicity and induce tolerance.

[0106] In some embodiments, the binding potential with respect to a panel of common Class II super-type alleles, covering the majority (e.g., 90%) of the population (e.g., human population) may be determined. In some cases, potential immunogenicity is not randomly distributed throughout protein sequences but instead tends to “cluster” in immunogenic regions (which are often also immunodominant), facilitating the process of deimmunization. A statistical algorithm (e.g., ClustiMer) may be used to screen results sets and identify putative T-cell epitope clusters. The ability to compare peptide scores across multiple alleles may be determined to evaluating the overall immunogenic potential of proteins. For a given Cas protein, the frequency and number of observed hits compared to expected hits may be used as an indicator of overall immunogenic potential. The expectation may be based on an analysis of a large sample of randomly generated sequences with normal amino acid frequencies; the expectation may be expressed as hits per 1000 amino acids to account for the variable sizes of target proteins.

[0107] Within proteins, regional immunogenic potential (T cell epitope clusters) can be assessed. Potential immunogenicity may not be evenly distributed across the length of a protein but tends to cluster.

[0108] Diminishing the immunogenicity of therapeutic proteins without hindering their function may improve clinical outcomes. This can be accomplished by substituting key amino acids within T cell epitope sequences which abrogate binding to HLA and thereby attenuate epitope potential to trigger a T cell response. In some cases, altered T cell epitopes no longer bind to HLA. Epitope modifications may be evaluated in vitro and in vivo prior to release of the Cas protein for clinical development. To identify amino acids within clusters that are suitable for modification, a “logo report” may be created for each of the immunogenic regions. These reports may identify “critical” residues, which contribute most to MHC binding. Also, one can independently choose mutations. In making the selections, one or more of the following may be considered: common mutations, changes tolerated in other species or variants of the target protein, published information describing residues important to structure and/or function and, if structural models are available, predicted impacts on tertiary structure. “Key” amino acids, may be highlighted in the logo report. Given this list of targeted amino acids and viable alternatives possible alternative sequences may be evaluated and a list of the best single amino acid changes, the best double changes, the best triple changes, and, even more complex changes, may be compiled. The de-immunized sequences may then be validated (in vitro) before being integrated into the protein and tested for functionality (in-vivo).

[0109] In some embodiments, immunodominant determinants, rather than all peptides capable of binding to class II HLA, may be modified. For example, the modifications may be limited to one or two amino acids per immunodominant region thus further reducing the impact on protein function. The modification of a few immunodominant epitopes with promiscuous binding may reduce immunogenicity of the Cas proteins.

[0110] Each of the identified epitopes and corresponding variants may be tested as peptides in-vitro for binding affinity with respect to a panel of MHC Class II alleles. The HLA cell free binding assay may serve as a “first pass” screen for confirming epitopes and de-immunized peptides. Any cluster that is not confirmed to bind may not need deimmunizing modifications.

[0111] In a binding assay screen, an unmodified peptide and its modified counterparts may be compared in their binding affinity for five HLA alleles. The unmodified peptide may bind with high affinity across three of four tested HLA alleles. Strategic modifications to this sequence confer disruption of binding. Failure to bind to HLA is usually indicative of lower immunogenicity in T cell assays.

[0112] The next step in the deimmunization process may be to integrate the modifications present in the de-immunized T-cell epitope clusters into the full-length protein. Expressed proteins may be purified, tested for function in vitro and for immunogenicity in HLA transgenic mice.

[0113] Tregitopes include a set of peptides that have the ability to call off the body's immune response and can induce tolerance to co-administered antigens. When appropriate, Tregitopes can be incorporated into the deimmunization. In some cases, Tregitopes include a set of peptides that specifically activate CD4+ CD25+FoxP3+ natural regulatory T cells (nTregs). Tregitopes may be promiscuous MHC Class II T cell epitopes located in the Fc and framework regions of Fab from IgG. In vitro, co-incubation of antigens with Tregitopes may lead to suppression of effector cytokine and chemokine secretion, reduced proliferation of effector T cells, and expansion of antigen-specific adaptive Tregs (aTregs). In vivo, co-administration of Tregitopes with a wide range of proteins (such as FVIII, thyroid stimulating hormone receptor, ovalbumin, and autoantigens) may lead to suppression of T cell and antibody responses to test antigens.

[0114] Examples of deimmunization methods also include those described in Parker A S et al., Structure-Guided Deimmunization of Therapeutic Proteins, J Comput Biol. 2013 February; 20(2): 152-165.

Screening and Selection of Cas Proteins with Reduced Immunogenicity

[0115] Using in silico methods such as described herein, highly functional Cas proteins, including various combinations of mutations, can be produced. Mutable amino acids at positions in a CRISPR protein, including but not limited to catalytic amino acids, nucleic acid-binding amino acids, surface amino acids can be selected and Cas variants produced are predicted to have lower immunogenicity while retaining stability and desired activity. In certain embodiments, mutations are evaluated for expression and activity and mutations selected, and the deimmunization process repeated. Resulting designs can be chosen and experimentally tested. CRISPR variants that are capable of being expressed can be purified and further characterized for activity, stability and immunogenicity.

[0116] Thus, the in silico methods can be combined with expression and characterization of the Cas proteins in vitro or in vivo. Furthermore, Cas proteins, including but not limited to variants developed in silico, can be beneficially mutated and/or selected, for example to achieve desired target binding and/or target cleavage. Cas proteins can be mutated and screened or selected by phage display. For example, to screen for Cas binding, a phage library can be developed that expresses mutants of a catalytically dead Cas proteins and screen or select mutants that form a complex with a guide and bind to an immobilized target. Procedures in silico, in vitro, and/or in vivo can be used repeatedly in any combination and order.

[0117] A useful procedure related to phage-display, is phage-assisted continuous evolution (PACE), which harnesses bacteriophage to continuously evolve proteins or nucleic acids toward desired functions in vivo. More particularly, the phage's ability to reproduce is linked to a desired molecular functionality such that improvement in the desired functionality is increases the replicative success of the phage. In the case of the filamentous bacteriophage M13, a gene required for phage infection (gene III) is moved from the phage genome to the host genome or to an accessory plasmid (AP) carried by the host and replication of a selection phage (SP) lacking gene III becomes dependent on production of the gene III produce (pIII) by the host. A gene encoding a function to be evolved is inserted into the selection phage (SP), and the host cell is engineered to express the gene III product (pIII protein) in proportion to the evolving function.

[0118] Additionally, a mutagenesis plasmid (MP) may be inserted in the host cells in order to increase the error rate during DNA replication. PACE requires no intervention during evolution and obviates the need to create DNA libraries, transform cells, extract genes, or perform DNA cloning steps during each round. Esvelt, K. M., Carlson, J. C. & Liu, D. R. (2011). A system for the continuous directed evolution of biomolecules. Nature, 472(7344):499-503. Esvelt evolved T7 RNA polymerases that recognize a distinct promoter, initiate transcripts with A instead of G, and initiate transcripts with C. Esvelt also linked protein-protein binding and recombinase activity to phage infectivity in discrete infection assays by creating variants of the AP that associate each of these activities with pIII production.

[0119] In some instances, it will be desirable to provide evolutionary stepping stones, for example where the initial activity and desired activity are far apart. The stepping stones guide evolving gene populations through points in a fitness landscape that bring them successively closer to the desired activity. Packer et al., 2017, “Phage-assisted continuous evolution of proteases with altered substrate specificity,” Nature Communications 8:956, performed PACE of TEV protease, which canonically cleaves ENLYFQS, to cleave a very different target sequence, HPLVGHM, that is present in human IL-23. Simply replacing the TEV consensus substrate with the target peptide resulted in failure of the phage to propagate, consistent with the inability of wild-type TEV protease, or TEV variants containing a handful of immediately accessible mutations, to cleave the target IL-23 peptide. The authors therefore introduced selected substrate changes one stepping stone at a time to avoid collapse of the evolving phage population.

[0120] PACE has been used to broaden PAM compatibility and increase target specificity of SpCas9. See, Hu et al., 2018, Evolved Cas9 variants with broad PAM compatibility and high DNA specificity, Nature 556:57 doi: 10.1038/nature26155. Epub 2018 Feb. 28. To link Cas9 DNA recognition to phage propagation during PACE, the authors employed a bacterial one-hybrid selection in which the SP encodes a catalytically dead SpCas9 (dCas9) fused to the ω subunit of bacterial RNA polymerase. When the fusion bound an AP-encoded sgRNA and a PAM and protospacer upstream of gene III in the AP, RNA polymerase recruitment caused gene III expression and phage propagation.

[0121] According to the invention, PACE is useful for maintaining and/or modulating function of reduced immunogenicity CRISPR proteins and conjugates. In one non-limiting example, an SP encodes a dead CRISPR proteins fused to the ω subunit of bacterial RNA polymerase wherein the CRISPR protein further comprises one or more mutations designed to reduce immunogenicity and the AP encodes an sgRNA and a PAM and protospacer upstream of gene III in the AP. Mutations in the reduced immunogenicity CRISPR that restore or improve CRISPR-crRNA complex formation and binding to the PAM-containing target cause increased gene III expression when the RNA polymerase is brought in proximity and thus increase phage propagation.

### CRISPR-Cas Systems in General

[0122] In general, a CRISPR-Cas or CRISPR system as used in herein and in documents, such as WO 2014/093622 (PCT/US2013/074667), refers collectively to transcripts and other elements involved in the expression of or directing the activity of CRISPR-associated (“Cas”) genes, including sequences encoding a Cas gene, a tracr (trans-activating CRISPR) sequence (e.g. tracrRNA or an active partial tracrRNA), a tracr-mate sequence (encompassing a “direct repeat” and a tracrRNA-processed partial direct repeat in the context of an endogenous CRISPR system), a guide sequence (also referred to as a “spacer” in the context of an endogenous CRISPR system), or “RNA(s)” as that term is herein used (e.g., RNA(s) to guide Cas, such as Cas9, e.g. CRISPR RNA and transactivating (tracr) RNA or a single guide RNA (sgRNA) (chimeric RNA)) or other sequences and transcripts from a CRISPR locus. In general, a CRISPR system is characterized by elements that promote the formation of a CRISPR complex at the site of a target sequence (also referred to as a protospacer in the context of an endogenous CRISPR system). See, e.g., Shmakov et al. (2015) “Discovery and Functional Characterization of Diverse Class 2 CRISPR-Cas Systems”, Molecular Cell, DOI: dx.doi.org/10.1016/j.molcel.2015.10.008.

[0123] In certain embodiments, a protospacer adjacent motif (PAM) or PAM-like motif directs binding of the effector protein complex as disclosed herein to the target locus of interest. In some embodiments, the PAM may be a 5′ PAM (i.e., located upstream of the 5′ end of the protospacer). In other embodiments, the PAM may be a 3′ PAM (i.e., located downstream of the 5′ end of the protospacer). The term “PAM” may be used interchangeably with the term “PFS” or “protospacer flanking site” or “protospacer flanking sequence”.

[0124] In a preferred embodiment, the CRISPR effector protein may recognize a 3′ PAM. In certain embodiments, the CRISPR effector protein may recognize a 3′ PAM which is 5′H, wherein H is A, C or U.

[0125] In the context of formation of a CRISPR complex, “target sequence” refers to a sequence to which a guide sequence is designed to have complementarity, where hybridization between a target sequence and a guide sequence promotes the formation of a CRISPR complex. A target sequence may comprise RNA polynucleotides. The term “target RNA” refers to a RNA polynucleotide being or comprising the target sequence. In other words, the target RNA may be a RNA polynucleotide or a part of a RNA polynucleotide to which a part of the gRNA, i.e. the guide sequence, is designed to have complementarity and to which the effector function mediated by the complex comprising CRISPR effector protein and a gRNA is to be directed. In some embodiments, a target sequence is located in the nucleus or cytoplasm of a cell.

[0126] CRISPR systems and Cas proteins may be from or derived from Aeropyrum, Pyrobaculum, Sulfolobus, Archaeoglobus, Halocarcula, Methanobacterium, Methanococcus, Methanosarcina, Methanopyrus, Pyrococcus, Picrophilus, Thermoplasma, Corynebacterium, Mycobacterium, Streptomyces, Aquifex, Porphyromonas, Chlorobium, Thermus, Bacillus, Listeria, Staphylococcus, Clostridium, Thermoanaerobacter, Mycoplasma, Fusobacterium, Azarcus, Chromobacterium, Neisseria, Nitrosomonas, Desulfovibrio, Geobacter, Myxococcus, Campylobacter, Wolinella, Acinetobacter, Erwinia, Escherichia, Legionella, Methylococcus, Pasteurella, Photobacterium, Salmonella, Xanthomonas, Yersinia, Treponema, and Thermotoga.

[0127] In certain example embodiments, the CRISPR effector protein may be delivered using a nucleic acid molecule encoding the CRISPR effector protein. The nucleic acid molecule encoding a CRISPR effector protein, may advantageously be a codon optimized CRISPR effector protein. An example of a codon optimized sequence, is in this instance a sequence optimized for expression in eukaryote, e.g., humans (i.e. being optimized for expression in humans), or for another eukaryote, animal or mammal as herein discussed; see, e.g., SaCas9 human codon optimized sequence in WO 2014/093622 (PCT/US2013/074667). Whilst this is preferred, it will be appreciated that other examples are possible and codon optimization for a host species other than human, or for codon optimization for specific organs is known. In some embodiments, an enzyme coding sequence encoding a CRISPR effector protein is a codon optimized for expression in particular cells, such as eukaryotic cells. The eukaryotic cells may be those of or derived from a particular organism, such as a plant or a mammal, including but not limited to human, or non-human eukaryote or animal or mammal as herein discussed, e.g., mouse, rat, rabbit, dog, livestock, or non-human mammal or primate. In some embodiments, processes for modifying the germ line genetic identity of human beings and/or processes for modifying the genetic identity of animals which are likely to cause them suffering without any substantial medical benefit to man or animal, and also animals resulting from such processes, may be excluded. In general, codon optimization refers to a process of modifying a nucleic acid sequence for enhanced expression in the host cells of interest by replacing at least one codon (e.g. about or more than about 1, 2, 3, 4, 5, 10, 15, 20, 25, 50, or more codons) of the native sequence with codons that are more frequently or most frequently used in the genes of that host cell while maintaining the native amino acid sequence. Various species exhibit particular bias for certain codons of a particular amino acid. Codon bias (differences in codon usage between organisms) often correlates with the efficiency of translation of messenger RNA (mRNA), which is in turn believed to be dependent on, among other things, the properties of the codons being translated and the availability of particular transfer RNA (tRNA) molecules. The predominance of selected tRNAs in a cell is generally a reflection of the codons used most frequently in peptide synthesis. Accordingly, genes can be tailored for optimal gene expression in a given organism based on codon optimization. Codon usage tables are readily available, for example, at the “Codon Usage Database” available at kazusa.orjp/codon/ and these tables can be adapted in a number of ways. See Nakamura, Y., et al. “Codon usage tabulated from the international DNA sequence databases: status for the year 2000” Nucl. Acids Res. 28:292 (2000). Computer algorithms for codon optimizing a particular sequence for expression in a particular host cell are also available, such as Gene Forge (Aptagen; Jacobus, Pa.), are also available. In some embodiments, one or more codons (e.g. 1, 2, 3, 4, 5, 10, 15, 20, 25, 50, or more, or all codons) in a sequence encoding a Cas correspond to the most frequently used codon for a particular amino acid.

[0128] In certain embodiments, the methods as described herein may comprise providing a Cas transgenic cell in which one or more nucleic acids encoding one or more guide RNAs are provided or introduced operably connected in the cell with a regulatory element comprising a promoter of one or more gene of interest. As used herein, the term “Cas transgenic cell” refers to a cell, such as a eukaryotic cell, in which a Cas gene has been genomically integrated. The nature, type, or origin of the cell are not particularly limiting according to the present invention. Also the way the Cas transgene is introduced in the cell may vary and can be any method as is known in the art. In certain embodiments, the Cas transgenic cell is obtained by introducing the Cas transgene in an isolated cell. In certain other embodiments, the Cas transgenic cell is obtained by isolating cells from a Cas transgenic organism. By means of example, and without limitation, the Cas transgenic cell as referred to herein may be derived from a Cas transgenic eukaryote, such as a Cas knock-in eukaryote. Reference is made to WO 2014/093622 (PCT/US13/74667), incorporated herein by reference. Methods of US Patent Publication Nos. 20120017290 and 20110265198 assigned to Sangamo BioSciences, Inc. directed to targeting the Rosa locus may be modified to utilize the CRISPR Cas system of the present invention. Methods of US Patent Publication No. 20130236946 assigned to Cellectis directed to targeting the Rosa locus may also be modified to utilize the CRISPR Cas system of the present invention. By means of further example reference is made to Platt et. al. (Cell; 159(2):440-455 (2014)), describing a Cas9 knock-in mouse, which is incorporated herein by reference. The Cas transgene can further comprise a Lox-Stop-polyA-Lox(LSL) cassette thereby rendering Cas expression inducible by Cre recombinase. Alternatively, the Cas transgenic cell may be obtained by introducing the Cas transgene in an isolated cell. Delivery systems for transgenes are well known in the art. By means of example, the Cas transgene may be delivered in for instance eukaryotic cell by means of vector (e.g., AAV, adenovirus, lentivirus) and/or particle and/or nanoparticle delivery, as also described herein elsewhere.

[0129] It will be understood by the skilled person that the cell, such as the Cas transgenic cell, as referred to herein may comprise further genomic alterations besides having an integrated Cas gene or the mutations arising from the sequence specific action of Cas when complexed with RNA capable of guiding Cas to a target locus.

[0130] In certain aspects the invention involves vectors, e.g. for delivering or introducing in a cell Cas and/or RNA capable of guiding Cas to a target locus (e.g., guide RNA), but also for propagating these components (e.g. in prokaryotic cells).

[0131] The embodiments disclosed herein may also comprise transgenic cells comprising the CRISPR effector system. In certain example embodiments, the transgenic cell may function as an individual discrete volume. In other words samples comprising a masking construct may be delivered to a cell, for example in a suitable delivery vesicle and if the target is present in the delivery vesicle the CRISPR effector is activated and a detectable signal generated.

[0132] Additional effectors for use according to the invention can be identified by their proximity to cas1 genes, for example, though not limited to, within the region 20 kb from the start of the cas1 gene and 20 kb from the end of the cas1 gene. In certain embodiments, the effector protein comprises at least one HEPN domain and at least 500 amino acids, and wherein the C2c2 effector protein is naturally present in a prokaryotic genome within 20 kb upstream or downstream of a Cas gene or a CRISPR array. In some examples, a CRISPR-Cas system comprises a Cas effector protein and guide RNA. Examples of Cas proteins include those of Class 1 (e.g., Type I, Type III, and Type IV) and Class 2 (e.g., Type II, Type V, and Type VI) Cas proteins, e.g., Cas9, Cas12 (e.g., Cas12a, Cas12b, Cas12c, Cas12d), Cas13 (e.g., Cas13a, Cas13b, Cas13c, Cas13d,), CasX, CasY, Cas14, variants thereof (e.g., mutated forms, truncated forms), homologs thereof, and orthologs thereof. In some examples, the Cas effector protein is Cas9. In some examples, the Cas effector protein is Cas12. In some examples, the Cas effector protein is Cas13. Additional effectors for use according to the invention can be identified by their proximity to cas1 genes, for example, though not limited to, within the region 20 kb from the start of the cas1 gene and 20 kb from the end of the cas1 gene. Other examples of Cas proteins include Cas1, Cas1B, Cas2, Cas3, Cas4, Cas5, Cas6, Cas7, Cas8, Cas9 (also known as Csn1 and Csx12), Cas10, Csy1, Csy2, Csy3, Cse1, Cse2, Csc1, Csc2, Csa5, Csn2, Csm2, Csm3, Csm4, Csm5, Csm6, Cmr1, Cmr3, Cmr4, Cmr5, Cmr6, Csb1, Csb2, Csb3, Csx17, Csx14, Csx10, Csx16, CsaX, Csx3, Csx1, Csx15, Csf1, Csf2, Csf3, Csf4, homologues thereof, or modified versions thereof.

[0133] The terms “orthologue” (also referred to as “ortholog” herein) and “homologue” (also referred to as “homolog” herein) are well known in the art. By means of further guidance, a “homologue” of a protein as used herein is a protein of the same species which performs the same or a similar function as the protein it is a homologue of. Homologous proteins may but need not be structurally related, or are only partially structurally related. An “orthologue” of a protein as used herein is a protein of a different species which performs the same or a similar function as the protein it is an orthologue of. Orthologous proteins may but need not be structurally related, or are only partially structurally related.

[0134] The present disclosure provides nucleic acid-targeting systems with reduced immunogenicity. In general, “nucleic acid-targeting system” as used in the present application refers collectively to transcripts and other elements involved in the expression of or directing the activity of nucleic acid-targeting CRISPR-associated (“Cas”) genes (also referred to herein as an effector protein), including sequences encoding a nucleic acid-targeting Cas (effector) protein and a guide RNA (comprising crRNA sequence and a trans-activating CRISPR/Cas system RNA (tracrRNA) sequence), or other sequences and transcripts from a nucleic acid-targeting CRISPR locus. In some embodiments, one or more elements of a nucleic acid-targeting system are derived from a Type II, Type V, and/or Type VI nucleic acid-targeting CRISPR system. In some embodiments, one or more elements of a nucleic acid-targeting system is derived from a particular organism comprising an endogenous nucleic acid-targeting CRISPR system. In general, a nucleic acid-targeting system is characterized by elements that promote the formation of a nucleic acid-targeting complex at the site of a target sequence. In the context of formation of a nucleic acid-targeting complex, “target sequence” refers to a sequence to which a guide sequence is designed to have complementarity, where hybridization between a target sequence and a guide RNA promotes the formation of a DNA or RNA-targeting complex. Full complementarity is not necessarily required, provided there is sufficient complementarity to cause hybridization and promote formation of a nucleic acid-targeting complex. A target sequence may comprise RNA polynucleotides. In some embodiments, a target sequence is located in the nucleus or cytoplasm of a cell. In some embodiments, the target sequence may be within an organelle of a eukaryotic cell, for example, mitochondrion or chloroplast. A sequence or template that may be used for recombination into the targeted locus comprising the target sequences is referred to as an “editing template” or “editing RNA” or “editing sequence”. In aspects of the invention, an exogenous template RNA may be referred to as an editing template. In an aspect of the invention the recombination is homologous recombination.

[0135] A CRISPR system is characterized by elements that promote the formation of a CRISPR complex at the site of a target sequence (also referred to as a protospacer in the context of an endogenous CRISPR system). In the context of formation of a CRISPR complex, “target sequence” refers to a sequence to which a guide sequence is designed to target, e.g. have complementarity, where hybridization between a target sequence and a guide sequence promotes the formation of a CRISPR complex. The section of the guide sequence through which complementarity to the target sequence is important for cleavage activity is referred to herein as the seed sequence. A target sequence may comprise any polynucleotide, such as DNA or RNA polynucleotides and is comprised within a target locus of interest. In some embodiments, a target sequence is located in the nucleus or cytoplasm of a cell.

[0136] In general, the term “guide sequence” is any polynucleotide sequence having sufficient complementarity with a target polynucleotide sequence to hybridize with the target sequence and direct sequence-specific binding of a nucleic acid-targeting complex to the target sequence. In some embodiments, the degree of complementarity between a guide sequence and its corresponding target sequence, when optimally aligned using a suitable alignment algorithm, is about or more than about 50%, 60%, 75%, 80%, 85%, 90%, 95%, 97.5%, 99%, or more. Optimal alignment may be determined with the use of any suitable algorithm for aligning sequences, non-limiting example of which include the Smith-Waterman algorithm, the Needleman-Wunsch algorithm, algorithms based on the Burrows-Wheeler Transform (e.g. the Burrows Wheeler Aligner), ClustalW, Clustal X, BLAT, Novoalign (Novocraft Technologies, ELAND (Illumina, San Diego, Calif.), SOAP (available at soap.genomics.org.cn), and Maq (available at maq.sourceforge.net). In some embodiments, a guide sequence is about or more than about 5, 10, 11, 12, 13, 14, 15, 16, 17, 18, 19, 20, 21, 22, 23, 24, 25, 26, 27, 28, 29, 30, 35, 40, 45, 50, 75, or more nucleotides in length. In some embodiments, a guide sequence is less than about 75, 50, 45, 40, 35, 30, 25, 20, 15, 12, or fewer nucleotides in length. The ability of a guide sequence to direct sequence-specific binding of a nucleic acid-targeting complex to a target sequence may be assessed by any suitable assay (as described in EP3009511 or US2016208243). For example, the components of a nucleic acid-targeting system sufficient to form a nucleic acid-targeting complex, including the guide sequence to be tested, may be provided to a host cell having the corresponding target sequence, such as by transfection with vectors encoding the components of the nucleic acid-targeting CRISPR sequence, followed by an assessment of preferential cleavage within or in the vicinity of the target sequence, such as by Surveyor assay as described herein. Similarly, cleavage of a target polynucleotide sequence (or a sequence in the vicinity thereof) may be evaluated in a test tube by providing the target sequence, components of a nucleic acid-targeting complex, including the guide sequence to be tested and a control guide sequence different from the test guide sequence, and comparing binding or rate of cleavage at or in the vicinity of the target sequence between the test and control guide sequence reactions. Other assays are possible, and will occur to those skilled in the art.

### Guide

[0137] A guide sequence may be selected to target any target sequence. In some embodiments, the target sequence is a sequence within a gene transcript or mRNA. In some embodiments, the target sequence is a sequence within a genome of a cell.

[0138] In some embodiments, a guide sequence is selected to reduce the degree of secondary structure within the guide sequence. Secondary structure may be determined by any suitable polynucleotide folding algorithm. Some programs are based on calculating the minimal Gibbs free energy. An example of one such algorithm is mFold, as described by Zuker and Stiegler (Nucleic Acids Res. 9 (1981), 133-148). Another example folding algorithm is the online webserver RNAfold, developed at Institute for Theoretical Chemistry at the University of Vienna, using the centroid structure prediction algorithm (see e.g. A. R. Gruber et al., 2008, Cell 106(1): 23-24; and P A Carr and G M Church, 2009, Nature Biotechnology 27(12): 1151-62). Further algorithms may be found in U.S. application Serial No. TBA (attorney docket 44790.11.2022; Broad Reference BI-2013/004A); incorporated herein by reference.

[0139] In certain embodiments, a guide RNA or crRNA may comprise, consist essentially of, or consist of a direct repeat (DR) sequence and a guide sequence or spacer sequence. In certain embodiments, the guide RNA or crRNA may comprise, consist essentially of, or consist of a direct repeat sequence fused or linked to a guide sequence or spacer sequence. In certain embodiments, the direct repeat sequence may be located upstream (i.e., 5′) from the guide sequence or spacer sequence. In other embodiments, the direct repeat sequence may be located downstream (i.e., 3′) from the guide sequence or spacer sequence. For the Cpf1 orthologs identified to date, the direct repeat is located upstream 5′ of the guide sequence.

[0140] In relation to a nucleic acid-targeting complex or system preferably, the crRNA sequence has one or more stem loops or hairpins and is 30 or more nucleotides in length, 40 or more nucleotides in length, or 50 or more nucleotides in length; In certain embodiments, the crRNA sequence is between 42 and 44 nucleotides in length, and the nucleic acid-targeting Cas protein is Cpf1 of Francisella tularensis subsp. novocida U112. In certain embodiments, the crRNA comprises, consists essentially of, or consists of 19 nucleotides of a direct repeat and between 23 and 25 nucleotides of spacer sequence, and the nucleic acid-targeting Cas protein is Cpf1 of Francisella tularensis subsp. novocida Ul12.

[0141] In certain embodiments, the crRNA comprises a stem loop, preferably a single stem loop. In certain embodiments, the direct repeat sequence forms a stem loop, preferably a single stem loop.

[0142] In certain embodiments, the spacer length of the guide RNA is from 15 to 35 nt. In certain embodiments, the spacer length of the guide RNA is at least 15 nucleotides. In certain embodiments, the spacer length is from 15 to 17 nt, e.g., 15, 16, or 17 nt, from 17 to 20 nt, e.g., 17, 18, 19, or 20 nt, from 20 to 24 nt, e.g., 20, 21, 22, 23, or 24 nt, from 23 to 25 nt, e.g., 23, 24, or 25 nt, from 24 to 27 nt, e.g., 24, 25, 26, or 27 nt, from 27-30 nt, e.g., 27, 28, 29, or 30 nt, from 30-35 nt, e.g., 30, 31, 32, 33, 34, or 35 nt, or 35 nt or longer.

[0143] In some embodiments, the direct repeat has a minimum length of 16 nts and a single stem loop. In further embodiments the direct repeat has a length longer than 16 nts, preferably more than 17 nts, and has more than one stem loop or optimized secondary structures. In some embodiments, the guide sequence is at least 16, 17, 18, 19, 20, 25 nucleotides, or between 16-30, or between 16-25, or between 16-20 nucleotides in length.

[0144] In some embodiments, direct repeats may be identified in silico by searching for repetitive motifs that fulfill any or all of the following criteria: 1. found in a 2 Kb window of genomic sequence flanking the type II CRISPR locus; 2. span from 20 to 50 bp; and 3. interspaced by 20 to 50 bp. In some embodiments, 2 of these criteria may be used, for instance 1 and 2, 2 and 3, or 1 and 3. In some embodiments, all 3 criteria may be used.

[0145] The “tracrRNA” sequence or analogous terms includes any polynucleotide sequence that has sufficient complementarity with a crRNA sequence to hybridize. As indicated herein above, in embodiments of the present invention, the tracrRNA is not required for cleavage activity of Cas protein complexes.

### Cas Proteins

[0146] Accordingly, when referring to the CRISPR system herein, in some aspects or embodiments, the CRISPR system comprises (i) a CRISPR protein or a polynucleotide encoding a CRISPR effector protein and (ii) one or more polynucleotides engineered to: complex with the CRISPR protein to form a CRISPR complex; and to complex with the target sequence.

[0147] In some embodiments, the therapeutic is for delivery (or application or administration) to a eukaryotic cell, either in vivo or ex vivo.

[0148] In some embodiments, the CRISPR protein is a nuclease directing cleavage of one or both strands at the location of the target sequence, or wherein the CRISPR protein is a nickase directing cleavage at the location of the target sequence.

[0149] In certain example embodiments, the Cas protein is the Cas protein of a Class 2 CRISPR-Cas system (i.e., a Class 2 Cas protein). A Class 2 CRISPR-Cas system may be of a subtype, e.g., Type II-A, Type II-B, Type II-C, Type V-A, Type V-B, Type V-C, or Type V—U, CRISPR-Cas system. In certain example embodiments, the Cas protein is Cas9, Cas12a, Cas12b, Cas12c, or Cas12d. In some embodiments, Cas9 may be SpCas9, SaCas9, StCas9 and other Cas9 orthologs. Cas 12 may be Cas12a, Cas12b, and Cas12c, including FnCas12a, or homology or orthologs thereof. The definition and exemplary members of the CRISPR-Cas system include those described in Kira S. Makarova and Eugene V. Koonin, Annotation and Classification of CRISPR-Cas systems, Methods Mol Biol. 2015; 1311: 47-75; and Sergey Shmakov et al., Diversity and evolution of class 2 CRISPR-Cas systems, Nat Rev Microbiol. 2017 March; 15(3): 169-182.

[0150] In some examples, the Cas protein comprises at least one RuvC and at least one HNH domain. In some examples, the Cas comprises at least one RuvC domain but does not comprise an HNH domain.

[0151] In some embodiments, the Cas protein may be a Cas protein of a Class 2, Type II CRISPR-Cas system (a Type II Cas protein). In some embodiments, the Cas protein may be a class 2 Type II Cas protein, e.g., Cas9. By “Cas9 (CRISPR associated protein 9)” is meant a polypeptide or fragment thereof having at least about 85% amino acid identity to NCBI Accession No. NP_269215 and having RNA binding activity, DNA binding activity, and/or DNA cleavage activity (e.g., endonuclease or nickase activity). “Cas9 function” can be defined by any of a number of assays including, but not limited to, fluorescence polarization-based nucleic acid bind assays, fluorescence polarization-based strand invasion assays, transcription assays, EGFP disruption assays, DNA cleavage assays, and/or Surveyor assays, for example, as described herein. By “Cas 9 nucleic acid molecule” is meant a polynucleotide encoding a Cas9 polypeptide or fragment thereof. An exemplary Cas9 nucleic acid molecule sequence is provided at NCBI Accession No. NC_002737. In some embodiments, disclosed herein are inhibitors of Cas9, e.g., naturally occurring Cas9 in S. pyogenes (SpCas9) or S. aureus (SaCas9), or variants thereof. Cas9 recognizes foreign DNA using Protospacer Adjacent Motif (PAM) sequence and the base pairing of the target DNA by the guide RNA (gRNA). The relative ease of inducing targeted strand breaks at any genomic loci by Cas9 has enabled efficient genome editing in multiple cell types and organisms. Cas9 derivatives can also be used as transcriptional activators/repressors.

[0152] In certain embodiments, the Cas protein may be a Cas protein of a Class 2, Type V CRISPR-Cas system (a Type V Cas protein). Examples of class 2 Type V Cas proteins include Cas12a (Cpf1), Cas12b (C2c1), Cas12c (C2c3), or Cas12k.

[0153] In some examples, the Cas protein is Cpf1. By “Cpf1 (CRISPR associated protein Cpf1)” is meant a polypeptide or fragment thereof having at least about 85% amino acid identity to GenBank Accession No. AJI61006. 1 and having RNA binding activity, DNA binding activity, and/or DNA cleavage activity (e.g., endonuclease or nickase activity). “Cpf1 function” can be defined by any of a number of assays including, but not limited to, fluorescence polarization-based nucleic acid bind assays, fluorescence polarization-based strand invasion assays, transcription assays, EGFP disruption assays, DNA cleavage assays, and/or Surveyor assays, for example, as described herein. By “Cpf1 nucleic acid molecule” is meant a polynucleotide encoding a Cpf1 polypeptide or fragment thereof. An exemplary Cpf1 nucleic acid molecule sequence is provided at GenBank Accession No. CP009633, nucleotides 652838-656740. Cpf1(CRISPR-associated protein Cpf1, subtype PREFRAN) is a large protein (about 1300 amino acids) that contains a RuvC-like nuclease domain homologous to the corresponding domain of Cas9 along with a counterpart to the characteristic arginine-rich cluster of Cas9. However, Cpf1 lacks the HNH nuclease domain that is present in all Cas9 proteins, and the RuvC-like domain is contiguous in the Cpf1 sequence, in contrast to Cas9 where it contains long inserts including the HNH domain. Accordingly, in particular embodiments, the CRISPR-Cas enzyme comprises only a RuvC-like nuclease domain.

[0154] The Cpf1 gene is found in several diverse bacterial genomes, typically in the same locus with cas1, cas2, and cas4 genes and a CRISPR cassette (for example, FNFX1_1431-FNFX1_1428 of Francisella cf. novicida Fx1). Thus, the layout of this putative novel CRISPR-Cas system appears to be similar to that of type II-B. Furthermore, similar to Cas9, the Cpf1 protein contains a readily identifiable C-terminal region that is homologous to the transposon ORF-B and includes an active RuvC-like nuclease, an arginine-rich region, and a Zn finger (absent in Cas9). However, unlike Cas9, Cpf1 is also present in several genomes without a CRISPR-Cas context and its relatively high similarity with ORF-B suggests that it might be a transposon component. It was suggested that if this was a genuine CRISPR-Cas system and Cpf1 is a functional analog of Cas9 it would be a novel CRISPR-Cas type, namely type V (See Annotation and Classification of CRISPR-Cas Systems. Makarova K S, Koonin E V. Methods Mol Biol. 2015; 1311:47-75). However, as described herein, Cpf1 is denoted to be in subtype V-A to distinguish it from C2c1p which does not have an identical domain structure and is hence denoted to be in subtype V-B.

[0155] In some examples, the Cas protein is Cc2c1. The C2c1 gene is found in several diverse bacterial genomes, typically in the same locus with cas1, cas2, and cas4 genes and a CRISPR cassette. Thus, the layout of this putative novel CRISPR-Cas system appears to be similar to that of type II-B. Furthermore, similar to Cas9, the C2c1 protein contains an active RuvC-like nuclease, an arginine-rich region, and a Zn finger (absent in Cas9). C2c1 (Cas12b) is derived from a C2c1 locus denoted as subtype V-B. Herein such effector proteins are also referred to as “C2c1p”, e.g., a C2c1 protein (and such effector protein or C2c1 protein or protein derived from a C2c1 locus is also called “CRISPR enzyme”). Presently, the subtype V-B loci encompasses cas1-Cas4 fusion, cas2, a distinct gene denoted C2c1 and a CRISPR array. C2c1 (CRISPR-associated protein C2c1) is a large protein (about 1100-1300 amino acids) that contains a RuvC-like nuclease domain homologous to the corresponding domain of Cas9 along with a counterpart to the characteristic arginine-rich cluster of Cas9. However, C2c1 lacks the HNH nuclease domain that is present in all Cas9 proteins, and the RuvC-like domain is contiguous in the C2c1 sequence, in contrast to Cas9 where it contains long inserts including the HNH domain. Accordingly, in particular embodiments, the CRISPR-Cas enzyme comprises only a RuvC-like nuclease domain.

[0156] C2c1 proteins are RNA guided nucleases. Its cleavage relies on a tracr RNA to recruit a guide RNA comprising a guide sequence and a direct repeat, where the guide sequence hybridizes with the target nucleotide sequence to form a DNA/RNA heteroduplex. Based on current studies, C2c1 nuclease activity also requires relies on recognition of PAM sequence. C2c1 PAM sequences may be T-rich sequences. In some embodiments, the PAM sequence is 5′ TTN 3′ or 5′ ATTN 3′, wherein N is any nucleotide. In a particular embodiment, the PAM sequence is 5′ TTC 3′. In a particular embodiment, the PAM is in the sequence of Plasmodium falciparum. C2c1 creates a staggered cut at the target locus, with a 5′ overhang, or a “sticky end” at the PAM distal side of the target sequence. In some embodiments, the 5′ overhang is 7 nt. See Lewis and Ke, Mol Cell. 2017 Feb. 2; 65(3):377-379.

[0157] In some embodiments, the Cas protein is a Type VI Cas, e.g., Cas13a, Cas13b, Cas13c, Cas13d.

[0158] In some embodiments, the CRISPR protein is a Cpf1 protein complexed with a CRISPR-Cas system RNA polynucleotide sequence, wherein the polynucleotide sequence comprises: a) a guide RNA polynucleotide capable of hybridizing to a target HBV sequence; and (b) a direct repeat RNA polynucleotide.

[0159] In some embodiments, the CRISPR protein is a Cpf1, and the system comprises: I. a CRISPR-Cas system RNA polynucleotide sequence, wherein the polynucleotide sequence comprises: (a) a guide RNA polynucleotide capable of hybridizing to a target sequence, and (b) a direct repeat RNA polynucleotide, and II. a polynucleotide sequence encoding the Cpf1, optionally comprising at least one or more nuclear localization sequences, wherein the direct repeat sequence hybridizes to the guide sequence and directs sequence-specific binding of a CRISPR complex to the target sequence, and wherein the CRISPR complex comprises the CRISPR protein complexed with (1) the guide sequence that is hybridized or hybridizable to the target sequence, and (2) the direct repeat sequence, and the polynucleotide sequence encoding a CRISPR protein is DNA or RNA.

[0160] In some embodiments, the CRISPR protein is a Cpf1 from Acidaminococcus sp. BV3L6 (AsCpf1), Lachnospiraceae bacterium ND2006 (LbCpf1) or Moraxella bovoculi 237.

[0161] In some embodiments, the CRISPR protein further comprises one or more nuclear localization sequences (NLSs) capable of driving the accumulation of the CRISPR protein to a detectible amount in the nucleus of the cell of the organism.

[0162] In some embodiments, the CRISPR protein comprises one or more mutations.

[0163] In some embodiments, the CRISPR protein has one or more mutations in a catalytic domain, and wherein the protein further comprises a functional domain.

[0164] In some embodiments, the CRISPR system is comprised within a delivery system, optionally: a vector system comprising one or more vectors, optionally wherein the vectors comprise one or more viral vectors, optionally wherein the one or more viral vectors comprise one or more lentiviral, adenoviral or adeno-associated viral (AAV) vectors; or a particle or lipid particle, optionally wherein the CRISPR protein is complexed with the polynucleotides to form the CRISPR complex.

[0165] In some embodiments, the system, complex or protein is for use in a method of modifying an organism or a non-human organism by manipulation of a target sequence in a genomic locus of interest.

[0166] In some embodiments, the polynucleotides encoding the sequence encoding or providing the CRISPR system are delivered via liposomes, particles, cell penetrating peptides, exosomes, microvesicles, or a gene-gun. In some embodiments, a delivery system is included. In some embodiments, the delivery system comprises: a vector system comprising one or more vectors comprising the engineered polynucleotides and polynucleotide encoding the CRISPR protein, optionally wherein the vectors comprise one or more viral vectors, optionally wherein the one or more viral vectors comprise one or more lentiviral, adenoviral or adeno-associated viral (AAV) vectors; or a particle or lipid particle, containing the CRISPR system or the CRISPR complex.

[0167] In some embodiments, the CRISPR protein has one or more mutations in a catalytic domain, and wherein the enzyme further comprises a functional domain.

[0168] In some embodiments, a recombination/repair template is provided.

### Exemplary Cas Proteins

[0169] The following are exemplary Cas proteins that can be deimmunized:

TABLE 2
Cas9 orthologs

| | |
|---|---|
| S. pyogenes | MDKKYSIGLD IGTNSVGWAV ITDEYKVPSK KFKVLGNTDR HSIKKNLIGA |
| Cas9 | LLFDSGETAE ATRLKRTARR RYTRRKNRIC YLQEIFSNEM AKVDDSFFHR |
| (SEQ ID NO. 1) | LEESFLVEED KKHERHPIFG NIVDEVAYHE KYPTIYHLRK KLVDSTDKAD |
| | LRLIYLALAH MIKFRGHFLI EGDLNPDNSD VDKLFIQLVQ TYNQLFEENP |
| | INASGVDAKA ILSARLSKSR RLENLIAQLP GEKKNGLFGN LIALSLGLTP |
| | NFKSNFDLAE DAKLQLSKDT YDDDLDNLLA QIGDQYADLF LAAKNLSDAI |
| | LLSDILRVNT EITKAPLSAS MIKRYDEHHQ DLTLLKALVR QQLPEKYKEI |
| | FFDQSKNGYA GYIDGGASQE EFYKFIKPIL EKMDGTEELL VKLNREDLLR |
| | KQRTFDNGSI PHQIHLGELH AILRRQEDFY PFLKDNREKI EKILTFRIPY |
| | YVGPLARGNS RFAWMTRKSE ETITPWNFEE VVDKGASAQS FIERMTNFDK |
| | NLPNEKVLPK HSLLYEYFTV YNELTKVKYV TEGMRKPAFL SGEQKKAIVD |
| | LLFKTNRKVT VKQLKEDYFK KIECFDSVEI SGVEDRFNAS LGTYHDLLKI |
| | IKDKDFLDNE ENEDILEDIV LTLTLFEDRE MIEERLKTYA HLFDDKVMKQ |
| | LKRRRYTGWG RLSRKLINGI RDKQSGKTIL DFLKSDGFAN RNFMQLIHDD |
| | SLTFKEDIQK AQVSGQGDSL HEHIANLAGS PAIKKGILQT VKVVDELVKV |
| | MGRHKPENIV IEMARENQTT QKGQKNSRER MKRIEEGIKE LGSQILKEHP |
| | VENTQLQNEK LYLYYLQNGR DMYVDQELDI NRLSDYDVDH IVPQSFLKDD |
| | SIDNKVLTRS DKNRGKSDNV PSEEVVKKMK NYWRQLLNAK LITQRKFDNL |
| | TKAERGGLSE LDKAGFIKRQ LVETRQITKH VAQILDSRMN TKYDENDKLI |
| | REVKVITLKS KLVSDFRKDF QFYKVREINN YHHAHDAYLN AVVGTALIKK |
| | YPKLESEFVY GDYKVYDVRK MIAKSEQEIG KATAKYFFYS NIMNFFKTEI |
| | TLANGEIRKR PLIETNGETG EIVWDKGRDF ATVRKVLSMP QVNIVKKTEV |
| | QTGGFSKESI LPKRNSDKLI ARKKDWDPKK YGGFDSPTVA YSVLVVAKVE |
| | KGKSKKLKSV KELLGITIME RSSFEKNPID FLEAKGYKEV KKDLIIKLPK |
| | YSLFELENGR KRMLASAGEL QKGNELALPS KYVNFLYLAS HYEKLKGSPE |
| | DNEQKQLFVE QHKHYLDEII EQISEFSKRV ILADANLDKV LSAYNKHRDK |
| | PIREQAENII HLFTLTNLGA PAAFKYFDTT IDRKRYTSTK EVLDATLIHQ |
| | SITGLYETRI DLS |
| S. aureus Cas9 | MKRNYILGLD IGITSVGYGI IDYETRDVID AGVRLFKEAN VENNEGRRSK |
| (SEQ ID NO. 2) | RGARRLKRRR RHRIQRVKKL LFDYNLLTDH SELSGINPYE ARVKGLSQKL |
| | SEEEFSAALL HLAKRRGVHN VNEVEEDTGN ELSTKEQISR NSKALEEKYV |
| | AELQLERLKK DGEVRGSINR FKTSDYVKEA KQLLKVQKAY HQLDQSFIDT |
| | YIDLLETRRT YYEGPGEGSP FGWKDIKEWY EMLMGHCTYF PEELRSVKYA |
| | YNADLYNALN DLNNLVITRD ENEKLEYYEK FQIIENVFKQ KKKPTLKQIA |
| | KEILVNEEDI KGYRVTSTGK PEFTNLKVYH DIKDITARKE IIENAELLDQ |
| | IAKILTIYQS SEDIQEELTN LNSELTQEEI EQISNLKGYT GTHNLSLKAI NLILDELWHT |
| | NDNQIAIFNR LKLVPKKVDL SQQKEIPTTL VDDFILSPVV KRSFIQSIKV |
| | INAIIKKYGL PNDIIIELAR EKNSKDAQKM INEMQKRNRQ TNERIEEIIR |
| | TTGKENAKYL IEKIKLHDMQ EGKCLYSLEA IPLEDLLNNP FNYEVDHIIP |
| | RSVSFDNSFN NKVLVKQEEN SKKGNRTPFQ YLSSSDSKIS YETFKKHILN |
| | LAKGKGRISK TKKEYLLEER DINRFSVQKD FINRNLVDTR YATRGLMNLL |
| | RSYFRVNNLD VKVKSINGGF TSFLRRKWKF KKERNKGYKH HAEDALIIAN |
| | ADFIFKEWKK LDKAKKVMEN QMFEEKQAES MPEIETEQEY KEIFITPHQI |
| | KHIKDFKDYK YSHRVDKKPN RELINDTLYS TRKDDKGNTL IVNNLNGLYD |
| | KDNDKLKKLI NKSPEKLLMY HHDPQTYQKL KLIMEQYGDE KNPLYKYYEE |
| | TGNYLTKYSK KDNGPVIKKI KYYGNKLNAH LDITDDYPNS RNKVVKLSLK |
| | PYRFDVYLDN GVYKFVTVKN LDVIKKENYY EVNSKCYEEA KKLKKISNQA |
| | EFIASFYNND LIKINGELYR VIGVNNDLLN RIEVNMIDIT YREYLENMND |
| | KRPPRIIKTI ASKTQSIKKY STDILGNLYE VKSKKHPQII KKG |
| Campylobacter | MARILAFDIG ISSIGWAFSE NDELKDCGVR IFTKVENPKT GESLALPRRL |
| jejuni Cas9 | ARSARKRLAR RKARLNHLKH LIANEFKLNY EDYQSFDESL AKAYKGSLIS |
| WP_002864485.1 | PYELRFRALN ELLSKQDFAR VILHIAKRRG YDDIKNSDDK EKGAILKAIK |
| (SEQ ID NO. 3) | QNEEKLANYQ SVGEYLYKEY FQKFKENSKE FTNVRNKKES YERCIAQSFL |
| | KDELKLIFKK QREFGFSFSK KFEEEVLSVA FYKRALKDFS HLVGNCSFFT |
| | DEKRAPKNSP LAFMFVALTR IINLLNNLKN TEGILYTKDD LNALLNEVLK |
| | NGTLTYKQTK KLLGLSDDYE FKGEKGTYFI EFKKYKEFIK ALGEHNLSQD |
| | DLNEIAKDIT LIKDEIKLKK ALAKYDLNQN QIDSLSKLEF KDHLNISFKA |
| | LKLVTPLMLE GKKYDEACNE LNLKVAINED KKDFLPAFNE TYYKDEVTNP |
| | VVLRAIKEYR KVLNALLKKY GKVHKINIEL AREVGKNHSQ RAKIEKEQNE |
| | NYKAKKDAEL ECEKLGLKIN SKNILKLRLF KEQKEFCAYS GEKIKISDLQ |
| | DEKMLEIDHI YPYSRSFDDS YMNKVLVFTK QNQEKLNQTP FEAFGNDSAK |
| | WQKIEVLAKN LPTKKQKRIL DKNYKDKEQK NFKDRNLNDT RYIARLVLNY |
| | TKDYLDFLPL SDDENTKLND TQKGSKVHVE AKSGMLTSAL RHTWGFSAKD |
| | RNNHLHHAID AVIIAYANNS IVKAFSDFKK EQESNSAELY AKKISELDYK |
| | NKRKFFEPFS GFRQKVLDKI DEIFVSKPER KKPSGALHEE TFRKEEEFYQ |
| | SYGGKEGVLK ALELGKIRKV NGKIVKNGDM FRVDIFKHKK TNKFYAVPIY |
| | TMDFALKVLP NKAVARSKKG EIKDWILMDE NYEFCFSLYK DSLILIQTKD |
| | MQEPEFVYYN AFTSSTVSLI VSKHDNKFET LSKNQKILFK NANEKEVIAK |
| | SIGIQNLKVF EKYIVSALGE VTKAEFRQRE DFKK |
| S. thermophilus | MSDLVLGLDI GIGSVGVGIL NKVTGEIIHK NSRIFPAAQA ENNLVRRTNR |
| Cas9 | QGRRLARRKK HRRVRLNRLF EESGLITDFT KISINLNPYQ LRVKGLTDEL |
| WP_011680957.1 | SNEELFIALK NMVKHRGISY LDDASDDGNS SVGDYAQIVK ENSKQLETKT |
| (SEQ ID NO. 4) | PGQIQLERYQ TYGQLRGDFT VEKDGKKHRL INVFPTSAYR SEALRILQTQ |
| | QEFNPQITDE FINRYLEILT GKRKYYHGPG NEKSRTDYGR YRTSGETLDN |
| | IFGILIGKCT FYPDEFRAAK ASYTAQEFNL LNDLNNLTVP TETKKLSKEQ |
| | KNQIINYVKN EKAMGPAKLF KYIAKLLSCD VADIKGYRID KSGKAEIHTF |
| | EAYRKMKTLE TLDIEQMDRE TLDKLAYVLT LNTEREGIQE ALEHEFADGS |
| | FSQKQVDELV QFRKANSSIF GKGWHNFSVK LMMELIPELY ETSEEQMTIL |
| | TRLGKQKTTS SSNKTKYIDE KLLTEEIYNP VVAKSVRQAI KIVNAAIKEY |
| | GDFDNIVIEM ARETNEDDEK KAIQKIQKAN KDEKDAAMLK AANQYNGKAE |
| | LPHSVFHGHK QLATKIRLWH QQGERCLYTG KTISIHDLIN NSNQFEVDHI |
| | LPLSITFDDS LANKVLVYAT ANQEKGQRTP YQALDSMDDA WSFRELKAFV |
| | RESKTLSNKK KEYLLTEEDI SKFDVRKKFI ERNLVDTRYA SRVVLNALQE |
| | HFRAHKIDTK VSVVRGQFTS QLRRHWGIEK TRDTYHHHAV DALIIAASSQ |
| | LNLWKKQKNT LVSYSEDQLL DIETGELISD DEYKESVFKA PYQHFVDTLK |
| | SKEFEDSILF SYQVDSKFNR KISDATIYAT RQAKVGKDKA DETYVLGKIK |
| | DIYTQDGYDA FMKIYKKDKS KFLMYRHDPQ TFEKVIEPIL ENYPNKQINE |
| | KGKEVPCNPF LKYKEEHGYI RKYSKKGNGP EIKSLKYYDS KLGNHIDITP |
| | KDSNNKVVLQ SVSPWRADVY FNKTTGKYEI LGLKYADLQF EKGTGTYKIS |
| | QEKYNDIKKK EGVDSDSEFK FTLYKNDLLL VKDTETKEQQ LFRFLSRTMP |
| | KQKHYVELKP YDKQKFEGGE ALIKVLGNVA NSGQCKKGLG KSNISIYKVR |
| | TDVLGNQHII KNEGDKPKLD F |
| Parvibaculum | MERIFGFDIG TTSIGFSVID YSSTQSAGNI QRLGVRIFPE ARDPDGTPLN |
| lavamentivorans | QQRRQKRMMR RQLRRRRIRR KALNETLHEA GFLPAYGSAD WPVVMADEPY |
| Cas9 | ELRRRGLEEG LSAYEFGRAI YHLAQHRHFK GRELEESDTP DPDVDDEKEA |
| WP_011995013.1 | ANERAATLKA LKNEQTTLGA WLARRPPSDR KRGIHAHRNV VAEEFERLWE |
| (SEQ ID NO. 5) | VQSKFHPALK SEEMRARISD TIFAQRPVFW RKNTLGECRF MPGEPLCPKG |
| | SWLSQQRRML EKLNNLAIAG GNARPLDAEE RDAILSKLQQ QASMSWPGVR |
| | SALKALYKQR GEPGAEKSLK FNLELGGESK LLGNALEAKL ADMFGPDWPA |
| | HPRKQEIRHA VHERLWAADY GETPDKKRVI ILSEKDRKAH REAAANSFVA |
| | DFGITGEQAA QLQALKLPTG WEPYSIPALN LFLAELEKGE RFGALVNGPD |
| | WEGWRRTNFP HRNQPTGEIL DKLPSPASKE ERERISQLRN PTVVRTQNEL |
| | RKVVNNLIGL YGKPDRIRIE VGRDVGKSKR EREEIQSGIR RNEKQRKKAT |
| | EDLIKNGIAN PSRDDVEKWI LWKEGQERCP YTGDQIGFNA LFREGRYEVE |
| | HIWPRSRSFD NSPRNKTLCR KDVNIEKGNR MPFEAFGHDE DRWSAIQIRL |
| | QGMVSAKGGT GMSPGKVKRF LAKTMPEDFA ARQLNDTRYA AKQILAQLKR |
| | LWPDMGPEAP VKVEAVTGQV TAQLRKLWTL NNILADDGEK TRADHRHHAI |
| | DALTVACTHP GMTNKLSRYW QLRDDPRAEK PALTPPWDTI RADAEKAVSE |
| | IVVSHRVRKK VSGPLHKETT YGDTGTDIKT KSGTYRQFVT RKKIESLSKG |
| | ELDEIRDPRI KEIVAAHVAG RGGDPKKAFP PYPCVSPGGP EIRKVRLTSK |
| | QQLNLMAQTG NGYADLGSNH HIAIYRLPDG KADFEIVSLF DASRRLAQRN |
| | PIVQRTRADG ASFVMSLAAG EAIMIPEGSK KGIWIVQGVW ASGQVVLERD |
| | TDADHSTTTR PMPNPILKDD AKKVSIDPIG RVRPSND |
| Corynebacter | MKYHVGIDVG TFSVGLAAIE VDDAGMPIKT LSLVSHIHDS GLDPDEIKSA |
| diphtheria Cas9 | VTRLASSGIA RRTRRLYRRK RRRLQQLDKF IQRQGWPVIE LEDYSDPLYP |
| WP_010933968.1 | WKVRAELAAS YIADEKERGE KLSVALRHIA RHRGWRNPYA KVSSLYLPDG |
| (SEQ ID NO. 6) | PSDAFKAIRE EIKRASGQPV PETATVGQMV TLCELGTLKL RGEGGVLSAR |
| | LQQSDYAREI QEICRMQEIG QELYRKIIDV VFAAESPKGS ASSRVGKDPL |
| | QPGKNRALKA SDAFQRYRIA ALIGNLRVRV DGEKRILSVE EKNLVFDHLV |
| | NLTPKKEPEW VTIAEILGID RGQLIGTATM TDDGERAGAR PPTHDTNRSI |
| | VNSRIAPLVD WWKTASALEQ HAMVKALSNA EVDDFDSPEG AKVQAFFADL |
| | DDDVHAKLDS LHLPVGRAAY SEDTLVRLTR RMLSDGVDLY TARLQEFGIE |
| | PSWTPPTPRI GEPVGNPAVD RVLKTVSRWL ESATKTWGAP ERVIIEHVRE |
| | GFVTEKRARE MDGDMRRRAA RNAKLFQEMQ EKLNVQGKPS RADLWRYQSV |
| | QRQNCQCAYC GSPITFSNSE MDHIVPRAGQ GSTNTRENLV AVCHRCNQSK |
| | GNTPFAIWAK NTSIEGVSVK EAVERTRHWV TDTGMRSTDF KKFTKAVVER |
| | FQRATMDEEI DARSMESVAW MANELRSRVA QHFASHGTTV RVYRGSLTAE |
| | ARRASGISGK LKFFDGVGKS RLDRRHHAID AAVIAFTSDY VAETLAVRSN |
| | LKQSQAHRQE APQWREFTGK DAEHRAAWRV WCQKMEKLSA LLTEDLRDDR |
| | VVVMSNVRLR LGNGSAHKET IGKLSKVKLS SQLSVSDIDK ASSEALWCAL |
| | TREPGFDPKE GLPANPERHI RVNGTHVYAG DNIGLFPVSA GSIALRGGYA |
| | ELGSSFHHAR VYKITSGKKP AFAMLRVYTI DLLPYRNQDL FSVELKPQTM |
| | SMRQAEKKLR DALATGNAEY LGWLVVDDEL VVDTSKIATD QVKAVEAELG |
| | TIRRWRVDGF FSPSKLRLRP LQMSKEGIKK ESAPELSKII DRPGWLPAVN |
| | KLFSDGNVTV VRRDSLGRVR LESTAHLPVT WKVQ |
| Streptococcus | MTNGKILGLD IGIASVGVGI IEAKTGKVVH ANSRLFSAAN AENNAERRGF |
| pasteurianus | RGSRRLNRRK KHRVKRVRDL FEKYGIVTDF RNLNLNPYEL RVKGLTEQLK |
| Cas9 | NEELFAALRT ISKRRGISYL DDAEDDSTGS TDYAKSIDEN RRLLKNKTPG |
| (SEQ ID NO. 7) | QIQLERLEKY GQLRGNFTVY DENGEAHRLI NVFSTSDYEK EARKILETQA |
| | DYNKKITAEF IDDYVEILTQ KRKYYHGPGN EKSRTDYGRF RTDGTTLENI |
| | FGILIGKCNF YPDEYRASKA SYTAQEYNFL NDLNNLKVST ETGKLSTEQK |
| | ESLVEFAKNT ATLGPAKLLK EIAKILDCKV DEIKGYREDD KGKPDLHTFE |
| | PYRKLKFNLE SINIDDLSRE VIDKLADILT LNTEREGIED AIKRNLPNQF TEEQISEIIK |
| | VRKSQSTAFN KGWHSFSAKL MNELIPELYA TSDEQMTILT RLEKFKVNKK |
| | SSKNTKTIDE KEVTDEIYNP VVAKSVRQTI KIINAAVKKY GDFDKIVIEM |
| | PRDKNADDEK KFIDKRNKEN KKEKDDALKR AAYLYNSSDK LPDEVFHGNK |
| | QLETKIRLWY QQGERCLYSG KPISIQELVH NSNNFEIDHI LPLSLSFDDS |
| | LANKVLVYAW TNQEKGQKTP YQVIDSMDAA WSFREMKDYV LKQKGLGKKK |
| | RDYLLTTENI DKIEVKKKFI ERNLVDTRYA SRVVLNSLQS ALRELGKDTK |
| | VSVVRGQFTS QLRRKWKIDK SRETYHHHAV DALIIAASSQ LKLWEKQDNP |
| | MFVDYGKNQV VDKQTGEILS VSDDEYKELV FQPPYQGFVN TISSKGFEDE |
| | ILFSYQVDSK YNRKVSDATI YSTRKAKIGK DKKEETYVLG KIKDIYSQNG |
| | FDTFIKKYNK DKTQFLMYQK DSLTWENVIE VILRDYPTTK KSEDGKNDVK |
| | CNPFEEYRRE NGLICKYSKK GKGTPIKSLK YYDKKLGNCI DITPEESRNK |
| | VILQSINPWR ADVYFNPETL KYELMGLKYS DLSFEKGTGN YHISQEKYDA |
| | IKEKEGIGKK SEFKFTLYRN DLILIKDIAS GEQEIYRFLS RTMPNVNHYV |
| | ELKPYDKEKF DNVQELVEAL GEADKVGRCI KGLNKPNISI YKVRTDVLGN |
| | KYFVKKKGDK PKLDFKNNKK |
| Neisseria | MAAFKPNPMN YILGLDIGIA SVGWAIVEID EEENPIRLID LGVRVFERAE |
| cinerea Cas9 | VPKTGDSLAA ARRLARSVRR LTRRRAHRLL RARRLLKREG VLQAADFDEN |
| WP_003676410.1 | GLIKSLPNTP WQLRAAALDR KLTPLEWSAV LLHLIKHRGY LSQRKNEGET |
| (SEQ ID NO. 8) | ADKELGALLK GVADNTHALQ TGDFRTPAEL ALNKFEKESG HIRNQRGDYS |
| | HTFNRKDLQA ELNLLFEKQK EFGNPHVSDG LKEGIETLLM TQRPALSGDA |
| | VQKMLGHCTF EPTEPKAAKN TYTAERFVWL TKLNNLRILE QGSERPLTDT |
| | ERATLMDEPY RKSKLTYAQA RKLLDLDDTA FFKGLRYGKD NAEASTLMEM |
| | KAYHAISRAL EKEGLKDKKS PLNLSPELQD EIGTAFSLFK TDEDITGRLK |
| | DRVQPEILEA LLKHISFDKF VQISLKALRR IVPLMEQGNR YDEACTEIYG |
| | DHYGKKNTEE KIYLPPIPAD EIRNPVVLRA LSQARKVING VVRRYGSPAR |
| | IHIETAREVG KSFKDRKEIE KRQEENRKDR EKSAAKFREY FPNFVGEPKS |
| | KDILKLRLYE QQHGKCLYSG KEINLGRLNE KGYVEIDHAL PFSRTWDDSF |
| | NNKVLALGSE NQNKGNQTPY EYENGKDNSR EWQEFKARVE TSRFPRSKKQ |
| | RILLQKFDED GFKERNLNDT RYINRFLCQF VADHMLLTGK GKRRVFASNG |
| | QITNLLRGFW GLRKVRAEND RHHALDAVVV ACSTIAMQQK ITRFVRYKEM |
| | NAFDGKTIDK ETGEVLHQKA HFPQPWEFFA QEVMIRVEGK PDGKPEFEEA |
| | DTPEKLRTLL AEKLSSRPEA VHKYVTPLFI SRAPNRKMSG QGHMVKSAKR |
| | LDEGISVLRV PLTQLKLKDL EKMVNREREP KLYEALKARL EAHKDDPAKA |
| | FAEPFYKYDK AGNRTQQVKA VRVEQVQKTG VWVHNHNGIA DNATIVRVDV |
| | FEKGGKYYLV PIYSWQVAKG ILPDRAVVQG KDEEDWTVMD DSFEFKFVLY |
| | ANDLIKLTAK KNEFLGYFVS LNRATGAIDI RTHDTDSTKG KNGIFQSVGV |
| | KTALSFQKYQ IDELGKEIRP CRLKKRPPVR |
| Campylobacter | MRILGFDIGI NSIGWAFVEN DELKDCGVRI FTKAENPKNK ESLALPRRNA |
| lari Cas9 | RSSRRRLKRR KARLIAIKRI LAKELKLNYK DYVAADGELP KAYEGSLASV |
| BAK69486.1 | YELRYKALTQ NLETKDLARV ILHIAKHRGY MNKNEKKSND AKKGKILSAL |
| (SEQ ID NO. 9) | KNNALKLENY QSVGEYFYKE FFQKYKKNTK NFIKIRNTKD NYNNCVLSSD |
| | LEKELKLILE KQKEFGYNYS EDFINEILKV AFFQRPLKDF SHLVGACTFF |
| | EEEKRACKNS YSAWEFVALT KIINEIKSLE KISGEIVPTQ TINEVLNLIL |
| | DKGSITYKKF RSCINLHESI SFKSLKYDKE NAENAKLIDF RKLVEFKKAL |
| | GVHSLSRQEL DQISTHITLI KDNVKLKTVL EKYNLSNEQI NNLLEIEFND |
| | YINLSFKALG MILPLMREGK RYDEACEIAN LKPKTVDEKK DFLPAFCDSI |
| | FAHELSNPVV NRAISEYRKV LNALLKKYGK VHKIHLELAR DVGLSKKARE |
| | KIEKEQKENQ AVNAWALKEC ENIGLKASAK NILKLKLWKE QKEICIYSGN |
| | KISIEHLKDE KALEVDHIYP YSRSFDDSFI NKVLVFTKEN QEKLNKTPFE |
| | AFGKNIEKWS KIQTLAQNLP YKKKNKILDE NFKDKQQEDF ISRNLNDTRY |
| | IATLIAKYTK EYLNFLLLSE NENANLKSGE KGSKIHVQTI SGMLTSVLRH |
| | TWGFDKKDRN NHLHHALDAI IVAYSTNSII KAFSDFRKNQ ELLKARFYAK |
| | ELTSDNYKHQ VKFFEPFKSF REKILSKIDE IFVSKPPRKR ARRALHKDTF |
| | HSENKIIDKC SYNSKEGLQI ALSCGRVRKI GTKYVENDTI VRVDIFKKQN |
| | KFYAIPIYAM DFALGILPNK IVITGKDKNN NPKQWQTIDE SYEFCFSLYK |
| | NDLILLQKKN MQEPEFAYYN DFSISTSSIC VEKHDNKFEN LTSNQKLLFS |
| | NAKEGSVKVE SLGIQNLKVF EKYIITPLGD KIKADFQPRE NISLKTSKKY GLR |

TABLE 3
C2c1 orthologs

| | |
|---|---|
| Alicyclobacillus | MVAVKSIKVKLMLGHLPEIREGLWHLHEAVNLGVRYYTEWLALLRQGNLYRRGKDGA |
| macrosporangiidus | QECYMTAEQCRQELLVRLRDRQKRNGHTGDPGTDEELLGVARRLYELLVPQSVGKKGQ |
| strain DSM 17980 | AQMLASGELSPLADPKSEGGKGTSKSGRKPAWMGMKEAGDSRWVEAKARYEANKAKD |
| (SEQ ID NO. 10) | PTKQVIASLEMYGLRPLFDVFTETYKTIRWMPLGKHQGVRAWDRDMFQQSLERLMSWE |
| | SWNERVGAEFARLVDRRDRFREKHFTGQEHLVALAQRLEQEMKEASPGFESKSSQAHRI |
| | TKRALRGADGIIDDWLKLSEGEPVDRFDEILRKRQAQNPRRFGSHDLFLKLAEPVFQPLW |
| | REDPSFLSRWASYNEVLNKLEDAKQFATFTLPSPCSNPVWARFENAEGTNIFKYDFLFDH |
| | FGKGRHGVRFQRMIVMRDGVPTEVEGIVVPIAPSRQLDALAPNDAASPIDVFVGDPAAPG |
| | AFRGQFGGAKIQYRRSALVRKGRREEKAYLCGFRLPSQRRTGTPADDAGEVFLNLSLRV |
| | ESQSEQAGRRNPPYAAVFHISDQTRRVIVRYGEIERYLAEHPDTGIPGSRGLTSGLRVMSV |
| | DLGLRTSAAISVFRVAHRDELTPDAHGRQPFFFPIHGMDHLVALHERSHLIRLPGETESKK |
| | VRSIREQRLDRLNRLRSQMASLRLLVRTGVLDEQKRDRNWERLQSSMERGGERMPSDW |
| | WDLFQAQVRYLAQHRDASGEAWGRMVQAAVRTLWRQLAKQVRDWRKEVRRNADKV |
| | KIRGIARDVPGGHSLAQLDYLERQYRFLRSWSAFSVQAGQVVRAERDSRFAVALREHID |
| | NGKKDRLKKLADRILMEALGYVYVTDGRRAGQWQAVYPPCQLVLLEELSEYRFSNDRP |
| | PSENSQLMVWSHRGVLEELIHQAQVHDVLVGTIPAAFSSRFDARTGAPGIRCRRVPSIPLK |
| | DAPSIPIWLSHYLKQTERDAAALRPGELIPTGDGEFLVTPAGRGASGVRVVHADINAAHN |
| | LQRRLWENFDLSDIRVRCDRREGKDGTVVLIPRLTNQRVKERYSGVIFTSEDGVSFTVGD |
| | AKTRRRSSASQGEGDDLSDEEQELLAEADDARERSVVLFRDPSGFVNGGRWTAQRAFW |
| | GMVHNRIETLLAERFSVSGAAEKVRG |
| Bacillus hisashii | MATRSFILKIEPNEEVKKGLWKTHEVLNHGIAYYMNILKLIRQEAIYEHHEQDPKNPKKV |
| strain | C4SKAEIQAELWDEVLKMQKCNSFTHEVDKDEVFNILRELYEELVPSSVEKKGEANQLSNKF |
| (SEQ ID NO. 11) | LYPLVDPNSQSGKGTASSGRKPRWYNLKIAGDPSWEEEKKKWEEDKKKDPLAKILGKLA |
| | EYGLIPLFIPYTDSNEPIVKEIKWMEKSRNQSVRRLDKDMFIQALERFLSWESWNLKVKEE |
| | YEKVEKEYKTLEERIKEDIQALKALEQYEKERQEQLLRDTLNTNEYRLSKRGLRGWREII |
| | QKWLKMDENEPSEKYLEVFKDYQRKHPREAGDYSVYEFLSKKENHFIWRNHPEYPYLY |
| | ATFCEIDKKKKDAKQQATFTLADPINHPLWVRFEERSGSNLNKYRILTEQLHTEKLKKKL |
| | TVQLDRLIYPTESGGWEEKGKVDIVLLPSRQFYNQIFLDIEEKGKHAFTYKDESIKFPLKG |
| | TLGGARVQFDRDHLRRYPHKVESGNVGRIYFNMTVNIEPTESPVSKSLKIHRDDFPKVVN |
| | FKPKELTEWIKDSKGKKLKSGIESLEIGLRVMSIDLGQRQAAAASIFEVVDQKPDIEGKLF |
| | FPIKGTELYAVHRASFNIKLPGETLVKSREVLRKAREDNLKLMNQKLNFLRNVLHFQQFE |
| | DITEREKRVTKWISRQENSDVPLVYQDELIQIRELMYKPYKDWVAELKQLHKRLEVEIGK |
| | EVKHWRKSLSDGRKGLYGISLKNIDEIDRTRKFLLRWSLRPTEPGEVRRLEPGQRFAIDQL |
| | NHLNALKEDRLKKMANTIIMHALGYCYDVRKKKWQAKNPACQIILFEDLSNYNPYEERS |
| | RFENSKLMKWSRREIPRQVALQGEIYGLQVGEVGAQFSSRFHAKTGSPGIRCSVVTKEKL |
| | QDNRFFKNLQREGRLTLDKIAVLKEGDLYPDKGGEKFISLSKDRKCVTTHADINAAQNL |
| | QKRFWTRTHGFYKVYCKAYQVDGQTVYIPESKDQKQKIIEEFGEGYFILKDGVYEWVNA |
| | GKLKIKKGSSKQSSSELVDSDILKDSFDLASELKGEKLMLYRDPSGNVFPSDKWMAAGV |
| | FFGKLERILISKLTNQYSISTIEDDSSKQSM |
| Candidatus | MPRDDLDLLTNLNSTAKGIRERGKTKEGTDKKKSGRKSSWPMDKAAWETAKTSDSSAH |
| Lindowbacteria | FLEKLKQHPDLKDAFGNLSSGGSKKLEYYKKLAGSAPWKESQSVILEKAARWKEAKQE |
| bacterium | REEKEQDSSEHGSKAAYRRLFDAGCLPMPEFAKYIDENQIEFGDLKLSDCGAEWKRGM |
| RIFCSPLOWO2 | WNQAGQRVRSHMGWQRRREKENAVYSLRKELFEKGGAIRRKKSEELTPEDILPGKAAP |
| (SEQ ID NO. 12) | DQNDWQERPAYGNQMWFIGLRSYEENEMAKYAEEAGMGSRSAPRIRRGTIKGWSKLRE |
| | RWLQILKRNPQATRDDLIGELNALRSQDPRAYGDARLFDWLSKTDQRFLWDGEDADGKI |
| | LCGRDDRDCVSAFVAYNEEFADEPSSITLTETDERLHPVWPFFGESSAVPYEIEYDLETAC |
| | PTAIRLPLLVGKENGGYAERQGTRLPLAEYADLASSFQLPTPVRLDVLVEIREVTRAGRK |
| | VTCPFSYFKQNGVWYVREGEIPSGESIQIKQTDRKIENGKIFISSKLRMAYRDDLMVSPAT |
| | GDFGSIKILWERIELASHVDQKKLPETAPARSRVFVSFSCNVVERAPRKQLTRKPDAVVV |
| | TIPSGVDQGLVVVSTDVRTGKSKSSSAPPLPPGSRLWPADAVHGDPPLRILSVDLGHRHS |
| | AYAVWELGLQQKSWRAGVLKGSTQTPVYADCTGTGLLCLPGDGEDTPAEEESLRLRSR |
| | QIRRRLNLQNSILRVSRLLSLDKFEKTIFEQSDVRDRPNKKGLRIRRRCRTEKTPLSEAEVR |
| | KNCDKAAEILIRWADTDAMAKSLAATGNADISFWKYMAVKNPPLSAVVDVAPSTIVPD |
| | DGPDRETLKKKRQEEEEKFASSIYENRVKLAGALCSGYDADHRRPATGGLWHDLDRTLI |
| | REISYGDRGQKGNPRKLNNEGILRLLRRPPRARPDWREFHRTLNDANRIPKGRTLRGGLS |
| | MGRLNFLKEVGDFVKKWSCRPRWPGDRRHIPPGQLFDRQDAEHLEHLRDDRIKRLAHLI |
| | VAQALGFEPDIRRGLWKYVDGSTGEILWQHPETRRFFAEGAAGELREVSRPAEIDDDAA |
| | ARPHTVSAPAHIVVFENLIRYRFQSDRPKTENAGLMQWAHRQIVHFTKQVASLYGLKVA |
| | MVYAAFSSKFCSRCGSPGARVSRFDPAWRNQEWFKRRTSNPRSKVDHSLKRASEDPTAD |
| | ETRPWVLIEGGKEFVCANAKCSAHDEPLNADENAAANIGLRFLRGVEDFRTKVNPAGAL |
| | KGKLRFETGIHSFRPPVSGSPFWSPMAEPAQKKKIGAAAPGADVDEAGDADESGVVVLF |
| | RDPSGAFRNKQYWYEGKIFWSNVMMAVEAKIAGASVGAKPVAASWGQAQPQSGPGLA |
| | KPGGD |
| Elusimicrobia | MNRIYQGRVTKVEVPDGKDEKGNIKWKKLENWSDILWQHHMLFQDAVNYYTLALAAI |
| bacterium | SGSAVGSDEKSIILREWAVQVQNIWEKAKKKATVFEGPQKRLTSILGLEQNASFDIAAKHI |
| RIFOXYA12 | LRTSEAKPEQRASALIRLLEEIDKKNHNVVCGERLPFFCPRNIQSKRSPTSKAVSSVQEQK |
| (SEQ ID NO. 13) | RQEEVRRFHNMQPEEVVKNAVTLDISLFKSSPKIVFLEDPKKARAELLKQFDNACKKHKE |
| | LVGIKKAFTESIDKHGSSLKVPAPGSKPSGLYPSAIVFKYFPVDITKTVFLKATEKLAMGK |
| | DREVTNDPIADARVNDKPHFDYFTNIALIREKEKNRAAWFEFDLAAFIEAIMSPHRFYQD |
| | TQKRKEAARKLEEKIKAIEGKGGQFKESDSEDDDVDSLPGFEGDTRIDLLRKLVTDTLGW |
| | LGESETPDNNEGKKTEYSISERTLRIFPDIQKQWSELAEKGETTEGKLLEVLKHEQTEHQS |
| | DFGSATLYQHLAKPEFHPIWLKSGTEEWHAENPLKAWLNYKELQYELTDKKRPIHFTPA |
| | HPVYSPRYFDFPKKSETEEKEVSKNTHSLTTSLASEHIKNSLQFTAGLIRKTNVGKKAIKA |
| | RFSYSAPRLRRDCLRSENNENLYKAPWLQPMMRALGIDEEKADRQNFANTRITLMAKGL |
| | DDIQLGFPVEANSQELQKEVSNGISWKGQFNWGGIASLSALRWPHEKKPKNPPEQPWWG |
| | IDSFSCLAVDLGQRYAGAFARLDVSTIEKKGKSRFIGEACDKKWYAKVSRMGLLRLPGE |
| | DVKVWRDASKIDKENGFAFRKELFGEKGRSATPLEAEETAELIKLFGANEKDVMPDNWS |
| | KELSFPEQNDKLLIVARRAQAAVSRLHRWAWFFDEAKRSDDAIREILESDDTDLKQKVN |
| | KNEIEKVKETIISLLKVKQELLPTLLTRLANRVLPLRGRSWEWKKHHQKNDGFILDQTGK |
| | AMPNVLIRGQRGLSMDRIEQITELRKRFQALNQSLRRQIGKKAPAKRDDSIPDCCPDLLEK |
| | LDHMKEQRVNQTAHMILAEALGLKLAEPPKDKKELNETCDMHGAYAKVDNPVSFIVIE |
| | DLSRYRSSQGRSPRENSRLMKWCHRAVRDKLKEMCEVFFPLCERRKAGSAWVSLPPLLE |
| | TPAAYSSRFCSRSGVAGFRAVEVIPGFELKYPWSWLKDKKDKAGNLAKEALNIRTVSEQ |
| | LKAFNQDKPEKPRTLLVPIAGGPIFVPISEVGLSSFGLKPQVVQADINAAINLGLRAISDPRI |
| | WEIHPRLRTEKRDGRLFAREKRKYGEEKVEVQPSKNEKAKKVKDDRKPNYFADFSGKV |
| | DWGFGNIKNESGLTLVSGKALWWTINQLQWERCFDINKRHIEDWSNKQKQ |
| Omnitrophica WOR_2 | MNRIYQGRVTKVEKLKNGKSPDDREELKDWQTALWRHHELFQDAVSYYTLALAAMAE |
| bacterium | GLPDKHPINVLRKRMEEAWEEFPRKTVTPAKNLRDSVRPWLGLSESASFGDALKKILPPA |
| RIFCSPHIGHO2 | PENKEVRALAVALLAEKARTLKPQKTSASYWGRFCDDLKKKPNWDYSEEELARKTGSG |
| (SEQ ID NO. 14) | DWVAGLWSEDALNKIDELAKSLKLSSLVKCVPDGQINPEGARNLVKEALDHLEGVSNGT |
| | KKEKNDPGPAKKTNNWLRQHASDVRNFIHKNKNQFSSLPNGRLITERARGGGININKTY |
| | AGVLFKAFPCPFTFDYVRAAVPEPKVKKVDQEKKSEQSATWTELEKRILRIGDDPIELAR |
| | KNNKPIFKAFTALEKWSDQNSKSCWSDFDKCAFEEALKTLNQFNQKTEEREKRRSEAEA |
| | ELKYMMDENPEWKPKKETEGDDVREVPILKGDPRYEKLVKLFGDLDEEGSEHATGKIYG |
| | PSRASLRGFGKLRNEWVDLFTKANDNPREQDLQKAVTGFQREHKLDMGYTAFFLKLCE |
| | RDYWDIWRDDTEVEVKKIREKRWVKSVVYAAADTRELAEELERLQEPVRYTPAEPQFSR |
| | RLFMFSDIKGKQGAKHIREGLVEVSLAVKDQSGKYGTCRVRLHYSAPRLIRDHLSDGSSS |
| | MWLQPMMAALGLSSDARGCFTRDSKGNVKEPAVALMSDFVGRKRELRMLLNFPVDLDI |
| | SKLEENIGKKARWEKQMNTAYEKNKLKQRFHLIWPGMELKETQEPGQFWWDNPTIQKE |
| | GMYCLAIDLSQRRAADYALLHAGVNRDSKTFVELGQAGGQSWFTKLCAAGSLRLPGED |
| | TEVIREGKRQIELSGKKGRNATQSEYDQAIALAKQLLHNENSAELESAARDWLGDNAKR |
| | FSFPEQNDKLIDLYYGALSRYKTWLRWSWRLTEQHKELWDKTLDEIRKVPYFASWGEL |
| | AGNGTNEATVQQLQKLIADAAVDLRNFLEKALLHIAYRALPLRENTWRWIENGKDGKG |
| | KPLHLLVSDGQSPAEIPWLRGQRGLSIARIEQLENFRRAVLSLNRLLRHEIGTKPEFGSSTC |
| | GESLPDPCPDLTDKIVRLKEERVNQTAHLIIAQSLGVRLKGHSLFTEEREKADMHGEHEVI |
| | PGRSPVDFVVLEDLSRYTTDKSRSRSENSRLMKWCHRKINEKVKLLAEPFGIPVIEVFASY |
| | SSKFDARTGAPGFRAVEVTSEDRPFWRKTIEKQSVAREVFDCLDNLVGKGLNGIHLVLPQ |
| | NGGPLFIAAVKEDQPLPAIRQADINAAVNIGLRAIAGPSCYHAHPKVRLIKGESGTDKGK |
| | WLPRKGKEANKRENAQFGNVDLDLEVKFNRLDIDSDVLKGDNTNLFHDPLNIACYGFAT |
| | IQNLQHPFLAHASAVFSRQKGAVARLQWEVCRAINSRRLEAWQKKAEKAAVKR |
| Phycisphaerae | MATKSYRARILTDSRLAAALDRTHVVFVESLKQMINTYLRMQNGKFGPDHKKLAQIMLS |
| bacterium ST- | RSNTFAHGVMDQITRDQPTSTLDEEWTDLARRIHKTTGPLFLQAERFATVKNRAIHTKSR |
| NAGAB-D1 | GKVIPSPETLAVPAKFWHQVCDSASAYIRSNRELMQQWRKDRAAWLKDKNEWQQKHP |
| (SEQ ID NO. 15) | EFMQFYNGPYQNFLKLCDDDRITSQLAAEQQPTASKNNRPRKTGKRFARWHLWYKWLS |
| | ENPEIIEWRNKASASDFKTVTDDVRKQIITKYPQQNKYITRLLDWLEDNNPELKTLENLRR |
| | TYVKKFDSFKRPPTLTLPSPYRHPYWFTMELDQFYKKADFENGTIQLLLIDEDDDGNWFF |
| | NWMPASLKPDPRLVPSWRAETFETEGRFPPYLGGKIGKKLSRPAPTDAERKAGIAGAKL |
| | MIKNNRSELLFTVFEQDCPPRVKWAKTKNRKCPADNAFSSDGKTRKPLRILSIDLGIRHIG |
| | AFALTQGTRNDSAWQTESLKKGIINSPSIPPLRQVRRHDYDLKRKRRRHGKPVKGQRSNA |
| | NLQAHRTNMAQDRFKKGASAIVSLAREHSADLILFENLHSLKFSAFDERWMNRQLRDM |
| | NRRHIVELVSEQAPEFGITVKDDINPWMTSRICSNCNLPGFRFSMKKKNPYREKLPREKCT |
| | DFGYPVWEPGGHLFRCPHCDHRVNADINAAANLANKFFGLGYWNNGLKYDAETKTFTV |
| | HTDKKTPPLIFKPRPQFDLWADSVKTRKQLGPDPF |
| Planctomycetes | MSVRSFQARVECDKQTMEHLWRTHKVFNERLPEIIKILFKMKRGECGQNDKQKSLYKSIS |
| bacterium | QSILEANAQNADYLLNSVSIKGWKPGTAKKYRNASFTWADDAAKLSSQGIHVYDKKQV |
| RBG_13_46_10 | LGDLPGMMSQMVCRQSVEAISGHIELTKKWEKEHNEWLKEKEKWESEDEHKKYLDLRE |
| (SEQ ID NO. 16) | KFEQFEQSIGGKITKRRGRWHLYLKWLSDNPDFAAWRGNKAVINPLSEKAQIRINKAKPN |
| | KKNSVERDEFFKANPEMKALDNLHGYYERNFVRRRKTKKNPDGFDHKPTFTLPHPTIHP |
| | RWFVFNKPKTNPEGYRKLILPKKAGDLGSLEMRLLTGEKNKGNYPDDWISVKFKADPRL |
| | SLIRPVKGRRVVRKGKEQGQTKETDSYEFFDKHLKKWRPAKLSGVKLIFPDKTPKAAYL |
| | YFTCDIPDEPLTETAKKIQWLETGDVTKKGKKRKKKVLPHGLVSCAVDLSMRRGTTGFA |
| | TLCRYENGKIHILRSRNLWVGYKEGKGCHPYRWTEGPDLGHIAKHKREIRILRSKRGKPV |
| | KGEESHIDLQKHIDYMGEDRFKKAARTIVNFALNTENAASKNGFYPRADVLLLENLEGLI |
| | PDAEKERGINRALAGWNRRHLVERVIEMAKDAGFKRRVFEIPPYGTSQVCSKCGALGRR |
| | YSIIRENNRREIRFGYVEKLFACPNCGYCANADHNASVNLNRRFLIEDSFKSYYDWKRLS |
| | EKKQKEEIETIESKLMDKLCAMHKISRGSISK |
| Spirochaetes | MSFTISYPFKLIIKNKDEAKALLDTHQYMNEGVKYYLEKLLMFRQEKIFIGEDETGKRIYI |
| bacterium | EETEYKKQIEEFYLIKKTELGRNLTLTLDEFKTLMRELYICLVSSSMENKKGFPNAQQASL |
| GWB1_27_13 | NIFSPLFDAESKGYILKEENNNISLIHKDYGKILLKRLRDNNLIPIFTKFTDIKKITAKLSPTA |
| (SEQ ID NO. 17) | LDRMIFAQAIEKLLSYESWCKLMIKERFDKEVKIKELENKCENKQERDKIFEILEKYEEER |
| | QKTFEQDSGFAKKGKFYITGRMLKGFDEIKEKWLKEKDRSEQNLINILNKYQTDNSKLV |
| | GDRNLFEFIIKLENQCLWNGDIDYLKIKRDINKNQIWLDRPEMPRFTMPDFKKHPLWYRY |
| | EDPSNSNFRNYKIEVVKDENYITIPLITERNNEYFEENYTFNLAKLKKLSENITFIPKSKNKE |
| | FEFIDSNDEEEDKKDQKKSKQYIKYCDTAKNTSYGKSGGIRLYFNRNELENYKDGKKMD |
| | SYTVFTLSIRDYKSLFAKEKLQPQITNTVDNKITSLKIQKKFGNEEQTNFLSYFTQNQITKK |
| | DWMDEKTFQNVKELNEGIRVLSVDLGQRFFAAVSCFEIMSEIDNNKLFFNLNDQNHKIIRI |
| | NDKNYYAKHIYSKTIKLSGEDDDLYKERKINKNYKLSYQERKNKIGIFTRQINKLNQLLKI |
| | IRNDEIDKEKFKELIETTKRYVKNTYNDGIIDWNNVDNKILSYENKEDVINLHKELDKKLE |
| | IDFKEFIRECRKPIFRSGGLSMQRIDFLEKLNKLKRKWVARTQKSAESIVLTPKFGYKLKE |
| | HINELKDNRVKQGVNYILMTALGYIKDNEIKNDSKKKQKEDWVKKNRACQIILMEKLTE |
| | YTFAEDRPREENSKLRMWSHRQIFNFLQQKASLWGILVGDVFAPYTSKCLSDNNAPGIRC |
| | HQVTKKDLIDNSWFLKIVVKDDAFCDLIEINKENVKNKSIKINDILPLRGGELFASIKDGKL |
| | HIVQADINASRNIAKRFLSQINPFRVVLKKDKDETFHLKNEPNYLKNYYSILNFVPTNEEL |
| | TFFKVEENKDIKPTKRIKMDKHEKESTDEGDDYSKNQIALFRDDSGIFFDKSLWVDGKIF |
| | WSVVKNKMTKLLRERNNKKNGSK |
| Verrucomicrobiaceae | MPLSRIYQGRTNSLIILTPTPQEPWDHKALARFDSPLWRHHALFQDAVNYYQLCLVALAS |
| bacterium UBA2429 | SDGTRPLSKLHEQMKASWDEAKTDTEDSWRVRLARRLGIPAASLFEAALAKVLEGNEAP |
| (SEQ ID NO. 18) | ERARELAGELLLDKIEGDIQQAGRGYWPRFCDPKANPTYDYSATARASASGLTKLAAVI |
| | HAENVTEEALKQVAAEMDLSWTVKLQPDKNFVGAEARARLLEAAHHFIKVAESPPTKL |
| | AEVLARFPDGLALWQALPEKIAALPEETQVPRNRKASPDLTFATLLFQHFPSLFTAAVLG |
| | LSVGKPKSVKAPKVVEKVSARRKANAVTQAVVIEEPEIDFAELGDDPIKLARGERGFVFP |
| | AFTSLSFWAVPGPHVPVWKEFDIAAFKEALKTVNQFKLKTSERNALLAEAQRRLDYMDE |
| | KTHDWKTGDSDEPGHIPPRLKSDPNFTLIQALTQDEGVSNKATGDQHIPKGVYTGGLRGF |
| | YAIKKDWCELWERKADKSQGTPTEEELISIVTDYQRDHVYDVGDVGLFRALCEPRFWPL |
| | WQPLTDEQEAERIKAGRAKDMISAYRVWLELQEDVVRLAQPIRFTPAHAENSRRLFMFS |
| | DISGSHGAEFGSDGKSLEVSIAYDVDGKLQPVRAKLEFSAPRAARDELEGLSGGSESMRW |
| | FQPMMKALDCPEVEMPALEKCAVSLMPDVVKKGGGKWVRLLLNFPATLEPEGLIRHIG |
| | KQAMWYKQFNGTYKPRTQQLDTGLHLYWPGLEKAPEAEDAAAWWNREEIRAKGFSVL |
| | SVDLGQRDAGAWALLESRSDKAFSRNRQPFIELGEAGGKLWSTALLGLGMLRLPGEDAR |
| | TGALDDQGKRAVEFHGKAGRNALEAEWQEAREMALLFGGEEAKSRLGPGFDHLSHSKQ |
| | NEELLRILSRAQSRLARFHRWSCRIHEKPEATGDDVIDYGQVDELLTKTAEAMLENLKAL |
| | YTNAGGILDSKSKQPLTLVGLRKKLEAQKVEPEKIAAVLKPHAEIIFQRLGTLIPELKQHL |
| | RVSLERLANRELPLRHREWVWNEAFEKLEQGNFKKEENPKWIRGQRGLSMARIEQIENL |
| | RKRFMSLRRQMSLIPGEQVKQGVEDKGQRQPEPCEDILNKLDRMKQQRVNQTAHLILAQ |
| | ALGLRLRPHLANDAEREEKDIHGEYELIPGRKPVDFIVMEDLSRYLSSQGRAPSENGRLM |
| | KWCHRAVLAKLKQMCEPFGIPVLEVPAAYSSRFCALTGVPGFRAVEVHDGNAEDFRWK |
| | RLIKKAEKDKSSKDAEAAAMLFDQLHDLNIEAREARKQDKKLPLRTLFAPVAGGPLFIPM |
| | VGGGPRQADMNAAINLGLRAIASPTCLRARPKIRAELKDGKHQAMLGNKLEKAAALTLE |
| | PPKEPTKELAAQKRTNFFLDEKFVGKFDTAHVTTSGKKLRLSGGMSLWKAIKDGAWQR |
| | VKKINDARIAKWKNNPPPEPDPDDEIQF |
| Alicyclobacillus | MAVKSIKVKLRLSECPDILAGMWQLHRATNAGVRYYTEWVSLMRQEILYSRGPDGGQQ |
| kakegawensis | CYMTAEDCQRELLRRLRNRQLHNGRQDQPGTDADLLAISRRLYEILVLQSIGKRGDAQQI |
| (SEQ ID NO. 19) | ASSFLSPLVDPNSKGGRGEAKSGRKPAWQKMRDQGDPRWVAAREKYEQRKAVDPSKEI |
| | LNSLDALGLRPLFAVFTETYRSGVDWKPLGKSQGVRTWDRDMFQQALERLMSWESWN |
| | RRVGEEYARLFQQKMKFEQEHFAEQSHLVKLARALEADMRAASQGFEAKRGTAHQITR |
| | RALRGADRVFEIWKSIPEEALFSQYDEVIRQVQAEKRRDFGSHDLFAKLAEPKYQPLWRA |
| | DETFLTRYALYNGVLRDLEKARQFATFTLPDACVNPIWTRFESSQGSNLHKYEFLFDHLG |
| | PGRHAVRFQRLLVVESEGAKERDSVVVPVAPSGQLDKLVLREEEKSSVALHLHDTARPD |
| | GFMAEWAGAKLQYERSTLARKARRDKQGMRSWRRQPSMLMSAAQMLEDAKQAGDV |
| | YLNISVRVKSPSEVRGQRRPPYAALFRIDDKQRRVTVNYNKLSAYLEEHPDKQIPGAPGL |
| | LSGLRVMSVDLGLRTSASISVFRVAKKEEVEALGDGRPPHYYPIHGTDDLVAVHERSHLI |
| | QMPGETETKQLRKLREERQAVLRPLFAQLALLRLLVRCGAADERIRTRSWQRLTKQGRE |
| | FTKRLTPSWREALELELTRLEAYCGRVPDDEWSRIVDRTVIALWRRMGKQVRDWRKQV |
| | KSGAKVKVKGYQLDVVGGNSLAQIDYLEQQYKFLRRWSFFARASGLVVRADRESHFAV |
| | ALRQHIENAKRDRLKKLADRILMEALGYVYEASGPREGQWTAQHPPCQLIILEELSAYRF |
| | SDDRPPSENSKLMAWGHRGILEELVNQAQVHDVLVGTVYAAFSSRFDARTGAPGVRCR |
| | RVPARFVGATVDDSLPLWLTEFLDKHRLDKNLLRPDDVIPTGEGEFLVSPCGEEAARVRQ |
| | VHADINAAQNLQRRLWQNFDITELRLRCDVKMGGEGTVLVPRVNNARAKQLFGKKVLV |
| | SQDGVTFFERSQTGGKPHSEKQTDLTDKELELIAEADEARAKSVVLFRDPSGHIGKGHWI |
| | RQREFWSLVKQRIESHTAERIRVRGVGSSLD |
| Bacillus | MAIRSIKLKMKTNSGTDSIYLRKALWRTHQLINEGIAYYMNLLTLYRQEAIGDKTKEAYQ |
| sp._V3-13 | AELINIIRNQQRNNGSSEEHGSDQEILALLRQLYELIIPSSIGESGDANQLGNKFLYPLVDPN |
| (SEQ ID NO. 20) | SQSGKGTSNAGRKPRWKRLKEEGNPDWELEKKKDEERKAKDPTVKIFDNLNKYGLLPLF |
| | PLFTNIQKDIEWLPLGKRQSVRKWDKDMFIQAIERLLSWESWNRRVADEYKQLKEKTES |
| | YYKEHLTGGEEWIEKIRKFEKERNMELEKNAFAPNDGYFITSRQIRGWDRVYEKWSKLP |
| | ESASPEELWKVVAEQQNKMSEGFGDPKVFSFLANRENRDIWRGHSERIYHIAAYNGLQK |
| | KLSRTKEQATFTLPDAIEHPLWIRYESPGGTNLNLFKLEEKQKKNYYVTLSKIIWPSEEKW |
| | IEKENIEIPLAPSIQFNRQIKLKQHVKGKQEISFSDYSSRISLDGVLGGSRIQFNRKYIKNHK |
| | ELLGEGDIGPVFFNLVVDVAPLQETRNGRLQSPIGKALKVISSDFSKVIDYKPKELMDWM |
| | NTGSASNSFGVASLLEGMRVMSIDMGQRTSASVSIFEVVKELPKDQEQKLFYSINDTELF |
| | AIHKRSFLLNLPGEVVTKNNKQQRQERRKKRQFVRSQIRMLANVLRLETKKTPDERKKAI |
| | HKLMEIVQSYDSWTASQKEVWEKELNLLTNMAAFNDEIWKESLVELHHRIEPYVGQIVS |
| | KWRKGLSEGRKNLAGISMWNIDELEDTRRLLISWSKRSRTPGEANRIETDEPFGSSLLQHI |
| | QNVKDDRLKQMANLIIMTALGFKYDKEEKDRYKRWKETYPACQIILFENLNRYLFNLDR |
| | SRRENSRLMKWAHRSIPRTVSMQGEMFGLQVGDVRSEYSSRFHAKTGAPGIRCHALTEE |
| | DLKAGSNTLKRLIEDGFINESELAYLKKGDIIPSQGGELFVTLSKRYKKDSDNNELTVIHA |
| | DINAAQNLQKRFWQQNSEVYRVPCQLARMGEDKLYIPKSQTETIKKYFGKGSFVKNNTE |
| | QEVYKWEKSEKMKIKTDTTFDLQDLDGFEDISKTIELAQEQQKKYLTMFRDPSGYFFNNE |
| | TWRPQKEYWSIVNNIIKSCLKKKILSNKVEL |
| Desulfatirhabdium | MPLSNNPPVTQRAYTLRLRGADPSDLSWREALWHTHEAVNKGAKVFGDWLLTLRGGL |
| butyrativorans | DHTLADTKVKGGKGKPDRDPTPEERKARRILLALSWLSVESKLGAPSSYIVASGDEPAKD |
| (SEQ ID NO. 21) | RNDNVVSALEEILQSRKVAKSEIDDWKRDCSASLSAAIRDDAVWVNRSKVFDEAVKSVG |
| | SSLTREEAWDMLERFFGSRDAYLTPMKDPEDKSSETEQEDKAKDLVQKAGQWLSSRYG |
| | TSEGADFCRMSDIYGKIAAWADNASQGGSSTVDDLVSELRQHFDTKESKATNGLDWIIG |
| | LSSYTGHTPNPVHELLRQNTSLNKSHLDDLKKKANTRAESCKSKIGSKGQRPYSDAILND |
| | VESVCGFTYRVDKDGQPVSVADYSKYDVDYKWGTARHYIFAVMLDHAARRISLAHKWI |
| | KRAEAERHKFEEDAKRIANVPARAREWLDSFCKERSVTSGAVEPYRIRRRAVDGWKEVV |
| | AAWSKSDCKSTEDRIAAARALQDDSEIDKFGDIQLFEALAEDDALCVWHKDGEATNEPD |
| | FQPLIDYSLAIEAEFKKRQFKVPAYRHPDELLHPVFCDFGKSRWKINYDVHKNVQAPFYR |
| | GLCLTLWTGSEIKPVPLCWQSKRLTRDLALGNNHRNDAASAVTRADRLGRAASNVTKS |
| | DMVNITGLFEQADWNGRLQAPRQQLEAIAVVRDNPRLSEQERNLRMCGMIEHIRWLVTF |
| | SVKLQPQGPWCAYAEQHGLNTNPQYWPHADTNRDRKVHARLILPRLPGLRVLSVDLGH |
| | RYAAACAVWEAVNTETVKEACQNVGRDMPKEHDLYLHIKVKKQGIGKQTEVDKTTIYR |
| | RIGADTLPDGRPHPAPWARLDRQFLIKLQGEEKDAREASNEEIWALHQMECKLDRTKPLI |
| | DRLIASGWGLLKRQMARLDALKELGWIPAPDSSENLSREDGEAKDYRESLAVDDLMFSA |
| | VRTLRLALQRHGNRARIAYYLISEVKIRPGGIQEKLDENGRIDLLQDALALWHELFSSPG |
| | WRDEAAKQLWDSRIATLAGYKAPEENGDNVSDVAYRKKQQVYREQLRNVAKTLSGDV |
| | ITCKELSDAWKERWEDEDQRWKKLLRWFKDWVLPSGTQANNATIRNVGGLSLSRLATI |
| | TEFRRKVQVGFFTRLRPDGTRHEIGEQFGQKTLDALELLREQRVKQLASRIAEAALGIGSE |
| | GGKGWDGGKRPRQRINDSRFAPCHAVVIENLANYRPDETRTRLENRRLMTWSASKVHK |
| | YLSEACQLNGLYLCTVSAWYTSRQDSRTGAPGIRCQDVSVREFMQSPFWRKQVKQAEA |
| | KHDENKGDARERFLCELNKTWKAKTPAEWKKAGFVRIPLRGGEIFVSADSKSPSAKGIH |
| | ADLNAAANIGLRALTDPDWPGKWWYVPCDPVSFESKMDYVKGCAAVKVGQPLRQPAQ |
| | TNADGAASKIRKGKKNRTAGTSKEKVYLWRDISAFPLESNEIGEWKETSAYQNDVQYRV |
| | IRMLKEHIKSLDNRTGDNVEG |
| Desulfonatronum | MVLGRKDDTAELRRALWTTHEHVNLAVAEVERVLLRCRGRSYWTLDRRGDPVHVPES |
| thiodismutans | QVAEDALAMAREAQRRNGWPVVGEDEEILLALRYLYEQIVPSCLLDDLGKPLKGDAQKI |
| (SEQ ID NO. 22) | GTNYAGPLFDSDTCRRDEGKDVACCGPFHEVAGKYLGALPEWATPISKQEFDGKDASHL |
| | RFKATGGDDAFFRVSIEKANAWYEDPANQDALKNKAYNKDDWKKEKDKGISSWAVKY |
| | IQKQLQLGQDPRTEVRRKLWLELGLLPLFIPVFDKTMVGNLWNRLAVRLALAHLLSWES |
| | WNHRAVQDQALARAKRDELAALFLGMEDGFAGLREYELRRNESIKQHAFEPVDRPYVV |
| | SGRALRSWTRVREEWLRHGDTQESRKNICNRLQDRLRGKFGDPDVFHWLAEDGQEALW |
| | KERDCVTSFSLLNDADGLLEKRKGYALMTFADARLHPRWAMYEAPGGSNLRTYQIRKT |
| | ENGLWADVVLLSPRNESAAVEEKTFNVRLAPSGQLSNVSFDQIQKGSKMVGRCRYQSAN |
| | QQFEGLLGGAEILFDRKRIANEQHGATDLASKPGHVWFKLTLDVRPQAPQGWLDGKGRP |
| | ALPPEAKHFKTALSNKSKFADQVRPGLRVLSVDLGVRSFAACSVFELVRGGPDQGTYFP |
| | AADGRTVDDPEKLWAKHERSFKITLPGENPSRKEEIARRAAMEELRSLNGDIRRLKAILR |
| | LSVLQEDDPRTEHLRLFMEAIVDDPAKSALNAELFKGEGDDRERSTPDLWKQHCHFFHD |
| | KAEKVVAERFSRWRTETRPKSSSWQDWRERRGYAGGKSYWAVTYLEAVRGLILRWNM |
| | RGRTYGEVNRQDKKQEGTVASALLHHINQLKEDRIKTGADMIIQAARGFVPRKNGAGW |
| | VQVHEPCRLILFEDLARYRERTDRSRRENSRLMRWSHREIVNEVGMQGELYGLHVDTTE |
| | AGFSSRYLASSGAPGVRCRHLVEEDFHDGLPGMHLVGELDWLLPKDKDRTANEARRLL |
| | GGMVRPGMLVPWDGGELFATLNAASQLHVIHADINAAQNLQRRFWGRCGEAIRIVCNQ |
| | LSVDGSTRYEMAKAPKARLLGALQQLKNGDAPFHLTSIPNSQKPENSYVMTPTNAGKKY |
| | RAGPGEKSSGEEDELALDIVEQAEELAQGRKTFFRDPSGVFFAPDRWLPSEIYWSRIRRRI |
| | WQVTLERNSSGRQERAEMDEMPY |
| Lentisphaeria | MAVELNRIYQGRVNHVYIFDENQNQVSVDNGDDLLFVHHELYQDAINYYLVALAAMAL |
| bacterium | DSKDSLFGKFKMQIRAVWNDFYRNGQLRPGLKHSLIRSLGHAAELNTSNGADIAMNLILE |
| (SEQ ID NO. 23) | DGGIPSEILNAALEHLAEKCTGDVSQLGKTFFPRFCDTAYHGNWDVDAKSFSEKKGRQR |
| | LVDALYSLHPVQAVQELAPEIEIGWGGVKTQTGKFFTGDEAKASLKKAISYFLQDTGKNS |
| | PELQEYFSVAGKQPLEQYLGKIDTFPEISFGRISSHQNINISNAMWILKFFPDQYSVDLIKNL |
| | IPNKKYEIGIAPQWGDDPVKLSRGKRGYTFRAFTDLAMWEKNWKVFDRAAFSDALKTIN |
| | QFRNKTQERNDQLKRYCAALNWMDGESSDKKPPVEPADADAVDEAATSVLPILAGDKR |
| | WNALLQLQKELGICNDFTENELMDYGLSLRTIRGYQKLRSMMLEKEEKMRAKTADDEEI |
| | SQALQEIIIKFQSSHRDTIGSVSLFLKLAEPKYFCVWHDADKNQNFASVDMVADAVRYYS |
| | YQEEKARLEEPIQITPADARYSRRVSDLYALVYKNAKECKTGYGLRPDGNFVFEIAQKNA |
| | KGYAPAKVVLAFSAPRLKRDGLIDKEFSAYYPPVLQAFLREEEAPKQSEKTTAVILMPDW |
| | DKNGKRRILLNFPIKLDVSAIHQKTDHRFENQFYFANNTNTCLLWPSYQYKKPVTWYQG |
| | KKPFDVVAVDLGQRSAGAVSRITVSTEKREHSVAIGEAGGTQWYAYRKFSGLLRLPGED |
| | ATVIRDGQRTEELSGNAGRLSTEEETVQACVLCKMLIGDATLLGGSDEKTIRSFPKQNDK |
| | LLIAFRRATGRMKQLQRWLWMLNENGLCDKAKTEISNSDWLVNKNIDNVLKEEKQHRE |
| | MLPAILLQIADRVLPLRGRKWDWVLNPQSNSFVLQQTAHGSGDPHKKICGQRGLSFARIE |
| | QLESLRMRCQALNRILMRKTGEKPATLAEMRNNPIPDCCPDILMRLDAMKEQRINQTAN |
| | LILAQALGLRHCLHSESATKRKENGMHGEYEKIPGVEPAAFVVLEDLSRYRFSQDRSSYE |
| | NSRLMKWSHRKILEKLALLCEVFNVPILQVGAAYSSKFSANAIPGFRAEECSIDQLSFYPW |
| | RELKDSREKALVEQlRKIGHRLLTFDAKATIIMPRNGGPVFIPFVPSDSKDTLIQADINASF |
| | NIGLRGVADATNLLCNNRVSCDRKKDCWQVKRSSNFSKMVYPEKLSLSFDPIKKQEGAG |
| | GNFFVLGCSERILTGTSEKSPVFTSSEMAKKYPNLMFGSALWRNEILKLERCCKINQSRLD |
| | KFIAKKEVQNEL |
| Laceyella | MSIRSFKLKIKTKSGVNAEELRRGLWRTHQLINDGIAYYMNWLVLLRQEDLERNEETNE |
| sediminis | IEKRSKEEIQGELLERVHKQQQRNQWSGEVDDQTLLQTLRHLYEEIVPSVIGKSGNASLK |
| (SEQ ID NO. 24) | ARFFLGPLVDPNNKTTKDVSKSGPTPKWKKMKDAGDPNWVQEYEKYMAERQTLVRLE |
| | EMGLIPLFPMYTDEVGDIHWLPQASGYTRTWDRDMFQQAIERLLSWESWNRRVRERRA |
| | QFEKKTHDFASRFSESDVQWMNKLREYEAQQEKSLEENAFAPNEPYALTKKALRGWER |
| | VYHSWMRLDSAASEEAYWQEVATCQTAMRGEFGDPAIYQFLAQKENHDIWRGYPERVI |
| | DFAELNHLQRELRRAKEDATFTLPDSVDHPLWVRYEAPGGTNIHGYDLVQDTKRNLTLI |
| | LDKFILPDENGSWHEVKKVPFSLAKSKQEHRQVWLQEEQKQKKREVVFYDYSTNLPHLG |
| | TLAGAKLQWDRNFLNKRTQQQIEETGEIGKVFFNISVDVRPAVEVKNGRLQNGLGKALT |
| | VLTHPDGTKIVTGWKAEQLEKWVGESGRVSSLGLDSLSEGLRVMSIDLGQRTSATVSVF |
| | EITKEAPDNPYKFFYQLEGTELFAVHQRSFLLALPGENPPQKIKQMREIRWKERNRIKQQV |
| | DQLSAILRLHKKVNEDERIQAIDKLLQKVASWQLNEEIATAWNQALSQLYSKAKENDLQ |
| | WNQAIKNAHHQLEPVVGKQISLWRKDLSTGRQGIAGLSLWSIEELEATKKLLTRWSKRS |
| | REPGVVKRIERFETFAKQIQHHINQVKENRLKQLANLIVMTALGYKYDQEQKKWIEVYP |
| | ACQVVLFENLRSYRFSYERSRRENKKLMEWSHRSIPKLVQMQGELFGLQVADVYAAYSS |
| | RYHGRTGAPGIRCHALTEADLRNETNIIHELIEAGFIKEEHRPYLQQGDLVPWSGGELFAT |
| | LQKPYDNPRILTLHADINAAQNIQKRFWHPSMWFRVNCESVMEGEIVTYVPKNKTVHKK |
| | QGKTFREVKVEGSDVYEWAKWSKNRNKNTFSSITERKPPSSMILFRDPSGTFFKEQEWVE |
| | QKTFWGKVQSMIQAYMKKTIVQRMEE |
| Methylobacterium | MYEAIVLADDANAQLANAFLGPLTDPNSAGFLEAFNKVDRPAPSWLDQVPASDPIDPAV |
| nodulans | LAEANAWLDTDAGRAWLVDTGAPPRWRSLAAKQDPIWPREFARKLGELRKEAASGTSA |
| (long form) | IIKALKRDFGVLPLFQPSLAPRILGSRSSLTPWDRLAFRLAVGHLLSWESWCTRARDEHTA |
| (SEQ lD NO. 25) | RVQRLEQFSSAHLKGDLATKVSTLREYERARKEQIAQLGLPMGERDFLITVRMTRGWDD |
| | LREKWRRSGDKGQEALHAIIATEQTRKRGRFGDPDLFRWLARPENHHVwADGHADAVG |
| | VLARVNAMERLVERSRDTALMTLPDPVAHPRSAQWEAEGGSNLRNYQLEAVGGELQIT |
| | LPLLKAADDGRCIDTPLSFSLAPSDQLQGVVLTKQDKQQKITYCTNMNEVFEAKLGSADL |
| | LLNWDHLRGRIRDRVDAGDIGSAFLKLALDVAHVLPDGVDDQLARAAFHFQSAKGAKS |
| | KHADSVQAGLRVLSIDLGVRSFATCSVFELKDTAPTTGVAFPLAEFRLWAVHERSFTLEL |
| | PGENVGAAGQQWRAQADAELRQLRGGLNRHRQLLRAATVQKGERDAYLTDLREAWSA |
| | KELWPFEASLLSELERCSTVADPLWQDTCKRAARLYRTEFGAVVSEWRSRTRSREDRKY |
| | AGKSMWSVQHLTDVRRFLQSWSLAGRASGDIRRLDRERGGVFAKDLLDHIDALKDDRL |
| | KTGADLIVQAARGFQRNEFGYWVQKHAPCHVILFEDLSRYRMRTDRPRRENSQLMQWA |
| | HRGVPDMVGMQGEIYGIQDRRDPDSARKHARQPLAAFCLDTPAAFSSRYHASTMTPGIR |
| | CHPLRKREFEDQGFLELLKRENEGLDLNGYKPGDLVPLPGGEVFVCLNANGLSRIHADIN |
| | AAQNLQRRFWTQHGDAFRLPCGKSAVQGQIRWAPLSMGKRQAGALGGFGYLEPTGHDS |
| | GSCQWRKTTEAEWRRLSGAQKDRDEAAAAEDEELQGLEEELLERSGERVVFFRDPSGV |
| | VLPTDLWFPSAAFWSIVRAKTVGRLRSHLDAQAEASYAVAAGL |
| Opitutaceae | MSLNRIYQGRVAAVETGTALAKGNVEWMPAAGGDEVLWQHHELFQAAINYYLVALLA |
| bacterium | LADKNNPVLGPLISQMDNPQSPYHVWGSFRRQGRQRTGLSQAVAPYITPGNNAPTLDEV |
| (SEQ ID NO. 26) | FRSILAGNPTDRATLDAALMQLLKACDGAGAIQQEGRSYWPKFCDPDSTANFAGDPAML |
| | RREQHRLLLPQVLHDPAITHDSPALGSFDTYSIATPDTRTPQLTGPKARARLEQAITLWRV |
| | RLPESAADFDRLASSLKKIPDDDSRLNLQGYVGSSAKGEVQARLFALLLFRHLERSSFTLG |
| | LLRSATPPPKNAETPPPAGVPLPAASAADPVRIARGKRSFVFRAFTSLPCWHGGDNIHPTW |
| | KSFDIAAFKYALTVINQIEEKTKERQKECAELETDFDYMHGRLAKIPVKYTTGEAEPPPIL |
| | ANDLRIPLLRELLQNIKVDTALTDGEAVSYGLQRRTIRGFRELRRIWRGHAPAGTVFSSEL |
| | KEKLAGELRQFQTDNSTTIGSVQLFNELIQNPKYWPIWQAPDVETARQWADAGFADDPL |
| | AALVQEAELQEDIDALKAPVKLTPADPEYSRRQYDFNAVSKFGAGSRSANRHEPGQTER |
| | GHNTFTTEIAARNAADGNRWRATHVRIHYSAPRLLRDGLRRPDTDGNEALEAVPWLQP |
| | MMEALAPLPTLPQDLTGMPVFLMPDVTLSGERRILLNLPVTLEPAALVEQLGNAGRWQN |
| | QFFGSREDPFALRWPADGAVKTAKGKTHIPWHQDRDHFTVLGVDLGTRDAGALALLNV |
| | TAQKPAKPVHRIIGEADGRTWYASLADARMIRLPGEDARLFVRGKLVQEPYGERGRNAS |
| | LLEWEDARNIILRLGQNPDELLGADPRRHSYPEINDKLLVALRRAQARLARLQNRSWRLR |
| | DLAESDKALDEIHAERAGEKPSPLPPLARDDAIKSTDEALLSQRDIIRRSFVQIANLILPLRG |
| | RRWEWRPHVEVPDCHILAQSDPGTDDTKRLVAGQRGISHERIEQIEELRRRCQSLNRALR |
| | HKPGERPVLGRPAKGEEIADPCPALLEKINRLRDQRVDQTAHAILAAALGVRLRAPSKDR |
| | AERRHRDIHGEYERFRAPADFVVIENLSRYLSSQDRARSENTRLMQWCHRQIVQKLRQL |
| | CETYGIPVLAVPAAYSSRFSSRDGSAGFRAVHLTPDHRHRMPWSRILARLKAHEEDGKRL |
| | EKTVLDEARAVRGLFDRLDRFNAGHVPGKPWRTLLAPLPGGPVFVPLGDATPMQADLN |
| | AAINIALRGIAAPDRHDIHHRLRAENKKRILSLRLGTQREKARWPGGAPAVTLSTPNNGA |
| | SPEDSDALPERVSNLFVDIAGVANFERVTIEGVSQKFATGRGLWASVKQRAWNRVARLN |
| | ETVTDNNRNEEEDDIPM |

[0170] Amino Acid Sequence of Human Codon Optimized Cpf1 Orthologs

[0171] In certain of the following, Cpf1 amino acids are followed by nuclear localization signals (NLS) (italics), a glycine-serine (GS) linker, and 3×HA tag.

1- Franscisella tularensis subsp. novicida U112 (FnCpf1)
(SEQ ID NO: 27)
MSIYQEFVNKYSLSKTLRFELIPQGKTLENIKARGLILDDEKRAKDYKKAKQII
DKYHQFFIEEILSSVCISEDLLQNYSDVYFKLKKSDDDNLQKDFKSAKDTIKKQISEYIKD
SEKFKNLFNQNLIDAKKGQESDLILWLKQSKDNGIELFKANSDITDIDEALEIIKSFKGWT
TYFKGFHENRKNVYSSNDIPTSIIYRIVDDNLPKFLENKAKYESLKDKAPEAINYEQIKKD
LAEELTFDIDYKTSEVNQRVFSLDEVFEIANFNNYLNQSGITKFNTIIGGKFVNGENTKRK
GINEYINLYSQQINDKTLKKYKMSVLFKQILSDTESKSFVIDKLEDDSDVVTTMQSFYEQI
AAFKTVEEKSIKETLSLLFDDLKAQKLDLSKIYFKNDKSLTDLSQQVFDDYSVIGTAVLE
YITQQIAPKNLDNPSKKEQELIAKKTEKAKYLSLETIKLALEEFNKHRDIDKQCRFEEILA
NFAAIPMIFDEIAQNKDNLAQISIKYQNQGKKDLLQASAEDDVKAIKDLLDQTNNLLHK
LKIFHISQSEDKANILDKDEHFYLVFEECYFELANIVPLYNKIRNYITQKPYSDEKFKLNFE
NSTLANGWDKNKEPDNTAILFIKDDKYYLGVMNKKNNKIFDDKAIKENKGEGYKKIVY
KLLPGANKMLPKVFFSAKSIKFYNPSEDILRIRNHSTHTKNGSPQKGYEKFEFNIEDCRKF
IDFYKQSISKHPEWKDFGFRFSDTQRYNSIDEFYREVENQGYKLTFENISESYIDSVVNQG
KLYLFQIYNKDFSAYSKGRPNLHTLYWKALFDERNLQDVVYKLNGEAELFYRKQSIPK
KITHPAKEAIANKNKDNPKKESVFEYDLIKDKRFTEDKFFFHCPITINFKSSGANKFNDEI
NLLLKEKANDVHILSIDRGERHLAYYTLVDGKGNIIKQDTFNIIGNDRMKTNYHDKLAAI
EKDRDSARKDWKKINNIKEMKEGYLSQVVHEIAKLVIEYNAIVVFEDLNFGFKRGRFKV
EKQVYQKLEKMLIEKLNYLVFKDNEFDKTGGVLRAYQLTAPFETFKKMGKQTGIIYYV
PAGFTSKICPVTGFVNQLYPKYESVSKSQEFFSKFDKICYNLDKGYFEFSFDYKNFGDKA
AKGKWTIASFGSRLINFRNSDKNHNWDTREVYPTKELEKLLKDYSIEYGHGECIKAAIC
GESDKKFFAKLTSVLNTILQMRNSKTGTELDYLISPVADVNGNFFDSRQAPKNMPQDAD
ANGAYHIGLKGLMLLGRIKNNQEGKKLNLVIKNEEYFEFVQNRNNKRPAATKKAGQAKK
KKGSYPYDVPDYAYPYDVPDYAYPYDVPDYA
3- Lachnospiraceae bacterium MC2017 (Lb3Cpf1)
(SEQ ID NO: 28)
MDYGNGQFERRAPLTKTITLRLKPIGETRETIREQKLLEQDAAFRKLVETVTPI
VDDCIRKIADNALCHFGTEYDFSCLGNAISKNDSKAIKKETEKVEKLLAKVLTENLPDGL
RKVNDINSAAFIQDTLTSFVQDDADKRVLIQELKGKTVLMQRFLTTRITALTVWLPDRV
FENFNIFIENAEKMRILLDSPLNEKIMKFDPDAEQYASLEFYGQCLSQKDIDSYNLIISGIY
ADDEVKNPGINEIVKEYNQQIRGDKDESPLPKLKKLHKQILMPVEKAFFVRVLSNDSDA
RSILEKILKDTEMLPSKIIEAMKEADAGDIAVYGSRLHELSHVIYGDHGKLSQIIYDKESK
RISELMETLSPKERKESKKRLEGLEEHIRKSTYTFDELNRYAEKNVMAAYIAAVEESCAE
IMRKEKDLRTLLSKEDVKIRGNRHNTLIVKNYFNAWTVFRNLIRILRRKSEAEIDSDFYD
VLDDSVEVLSLTYKGENLCRSYITKKIGSDLKPEIATYGSALRPNSRWWSPGEKFNVKFH
TIVRRDGRLYYFILPKGAKPVELEDMDGDIECLQMRKIPNPTIFLPKLVFKDPEAFFRDNP
EADEFVFLSGMKAPVTITRETYEAYRYKLYTVGKLRDGEVSEEEYKRALLQVLTAYKEF
LENRMIYADLNFGFKDLEEYKDSSEFIKQVETHNTFMCWAKVSSSQLDDLVKSGNGLLF
EIWSERLESYYKYGNEKVLRGYEGVLLSILKDENLVSMRTLLNSRPMLVYRPKESSKPM
VVHRDGSRVVDRFDKDGKYIPPEVHDELYRFFNNLLIKEKLGEKARKILDNKKVKVKV
LESERVKWSKFYDEQFAVTFSVKKNADCLDTTKDLNAEVMEQYSESNRLILIRNTTDIL
YYLVLDKNGKVLKQRSLNIINDGARDVDWKERFRQVTKDRNEGYNEWDYSRTSNDLK
EVYLNYALKEIAEAVIEYNAILIIEKMSNAFKDKYSFLDDVTFKGFETKLLAKLSDLHFR
GIKDGEPCSFTNPLQLCQNDSNKILQDGVIFMVPNSMTRSLDPDTGFIFAINDHNIRTKKA
KLNFLSKFDQLKVSSEGCLIMKYSGDSLPTHNTDNRVWNCCCNHPITNYDRETKKVEFI
EEPVEELSRVLEENGIETDTELNKLNERENVPGKVVDAIYSLVLNYLRGTVSGVAGQRA
VYYSPVTGKKYDISFIQAMNLNRKCDYYRIGSKERGEWTDFVAQLINKRPAATKKAGQA
KKKKGSYPYDVPDYAYPYDVPDYAYPYDVPDYA
4- Butyrivibrio proteoclasticus (BpCpf1)
(SEQ ID NO: 29)
MLLYENYTKRNQITKSLRLELRPQGKTLRNIKELNLLEQDKAIYALLERLKPV
IDEGIKDIARDTLKNCELSFEKLYEHFLSGDKKAYAKESERLKKEIVKTLIKNLPEGIGKIS
EINSAKYLNGVLYDFIDKTHKDSEEKQNILSDILETKGYLALFSKFLTSRITTLEQSMPKR
VIENFEIYAANIPKMQDALERGAVSFAIEYESICSVDYYNQILSQEDIDSYNRLISGIMDED
GAKEKGINQTISEKNIKIKSEHLEEKPFRILKQLHKQILEEREKAFTIDHIDSDEEVVQVTK
EAFEQTKEQWENIKKINGFYAKDPGDITLFIVVGPNQTHVLSQLIYGEHDRIRLLLEEYEK
NTLEVLPRRTKSEKARYDKFVNAVPKKVAKESHTFDGLQKMTGDDRLFILYRDELARN
YMRIKEAYGTFERDILKSRRGIKGNRDVQESLVSFYDELTKFRSALRIINSGNDEKADPIF
YNTFDGIFEKANRTYKAENLCRNYVTKSPADDARIMASCLGTPARLRTHWWNGEENFA
INDVAMIRRGDEYYYFVLTPDVKPVDLKTKDETDAQIFVQRKGAKSFLGLPKALFKCIL
EPYFESPEHKNDKNCVIEEYVSKPLTIDRRAYDIFKNGTFKKTNIGIDGLTEEKFKDDCRY
LIDVYKEFIAVYTRYSCFNMSGLKRADEYNDIGEFFSDVDTRLCTMEWIPVSFERINDMV
DKKEGLLFLVRSMFLYNRPRKPYERTFIQLFSDSNMEHTSMLLNSRAMIQYRAASLPRR
VTHKKGSILVALRDSNGEHIPMHIREAIYKMKNNFDISSEDFIMAKAYLAEHDVAIKKAN
EDIIRNRRYTEDKFFLSLSYTKNADISARTLDYINDKVEEDTQDSRMAVIVTRNLKDLTY
VAVVDEKNNVLEEKSLNEIDGVNYRELLKERTKIKYHDKTRLWQYDVSSKGLKEAYVE
LAVTQISKLATKYNAVVVVESMSSTFKDKFSFLDEQIFKAFEARLCARMSDLSFNTIKEG
EAGSISNPIQVSNNNGNSYQDGVIYFLNNAYTRTLCPDTGFVDVFDKTRLITMQSKRQFF
AKMKDIRIDDGEMLFTFNLEEYPTKRLLDRKEWTVKIAGDGSYFDKDKGEYVYVNDIV
REQIIPALLEDKAVFDGNMAEKFLDKTAISGKSVELIYKWFANALYGIITKKDGEKIYRSP
ITGTEIDVSKNTTYNFGKKFMFKQEYRGDGDFLDAFLNYMQAQDIAVKRPAATKKAGQA
KKKKGSYPYDVPDYAYPYDVPDYAYPYDVPDYA
5- Peregrinibacteria bacterium GW2011_GWA_33_10 (PeCpf1)
(SEQ ID NO: 30)
MSNFFKNFTNLYELSKTLRFELKPVGDTLTNMKDHLEYDEKLQTFLKDQNID
DAYQALKPQFDEIHEEFITDSLESKKAKEIDFSEYLDLFQEKKELNDSEKKLRNKIGETFN
KAGEKWKKEKYPQYEWKKGSKIANGADILSCQDMLQFIKYKNPEDEKIKNYIDDTLKG
FFTYFGGFNQNRANYYETKKEASTAVATRIVHENLPKFCDNVIQFKHIIKRKKDGTVEKT
ERKTEYLNAYQYLKNNNKITQIKDAETEKMIESTPIAEKIFDVYYFSSCLSQKQIEEYNRII
GHYNLLINLYNQAKRSEGKHLSANEKKYKDLPKFKTLYKQIGCGKKKDLFYTIKCDTEE
EANKSRNEGKESHSVEEIINKAQEAINKYFKSNNDCENINTVPDFINYILTKENYEGVYW
SKAAMNTISDKYFANYHDLQDRLKEAKVFQKADKKSEDDIKIPEAIELSGLFGVLDSLA
DWQTTLFKSSILSNEDKLKIITDSQTPSEALLKMIFNDIEKNMESFLKETNDIITLKKYKGN
KEGTEKIKQWFDYTLAINRMLKYFLVKENKIKGNSLDTNISEALKTLIYSDDAEWFKWY
DALRNYLTQKPQDEAKENKLKLNFDNPSLAGGWDVNKECSNFCVILKDKNEKKYLAIM
KKGENTLFQKEWTEGRGKNLTKKSNPLFEINNCEILSKMEYDFWADVSKMIPKCSTQLK
AVVNHFKQSDNEFIFPIGYKVTSGEKFREECKISKQDFELNNKVFNKNELSVTAMRYDLS
STQEKQYIKAFQKEYWELLFKQEKRDTKLTNNEIFNEWINFCNKKYSELLSWERKYKDA
LTNWINFCKYFLSKYPKTTLFNYSFKESENYNSLDEFYRDVDICSYKLNINTTINKSILDR
LVEEGKLYLFEIKNQDSNDGKSIGHKNNLHTIYWNAIFENFDNRPKLNGEAEIFYRKAIS
KDKLGIVKGKKTKNGTEIIKNYRFSKEKFILHVPITLNFCSNNEYVNDIVNTKFYNFSNLH
FLGIDRGEKHLAYYSLVNKNGEIVDQGTLNLPFTDKDGNQRSIKKEKYFYNKQEDKWE
AKEVDCWNYNDLLDAMASNRDMARKNWQRIGTIKEAKNGYVSLVIRKIADLAVNNER
PAFIVLEDLNTGFKRSRQKIDKSVYQKFELALAKKLNFLVDKNAKRDEIGSPTKALQLTP
PVNNYGDIENKKQAGIMLYTRANYTSQTDPATGWRKTIYLKAGPEETTYKKDGKIKNK
SVKDQIIETFTDIGFDGKDYYFEYDKGEFVDEKTGEIKPKKWRLYSGENGKSLDRFRGER
EKDKYEWKIDKIDIVKILDDLFVNFDKNISLLKQLKEGVELTRNNEHGTGESLRFAINLIQ
QIRNTGNNERDNDFILSPVRDENGKHFDSREYWDKETKGEKISMPSSGDANGAFNIARK
GIIMNAHILANSDSKDLSLFVSDEEWDLHLNNKTEWKKQLNIFSSRKAMAKRKKKRPAA
TKKAGQAKKKKGSYPYDVPDYAYPYDVPDYAYPYDVPDYA
6- Parcubacteria bacterium GWC2011_GWC2_44_17 (PbCpf1)
(SEQ ID NO: 31)
MENIFDQFIGKYSLSKTLRFELKPVGKTEDFLKINKVFEKDQTIDDSYNQAKF
YFDSLHQKFIDAALASDKTSELSFQNFADVLEKQNKIILDKKREMGALRKRDKNAVGID
RLQKEINDAEDIIQKEKEKIYKDVRTLFDNEAESWKTYYQEREVDGKKITFSKADLKQK
GADFLTAAGILKVLKYEFPEEKEKEFQAKNQPSLFVEEKENPGQKRYIFDSFDKFAGYLT
KFQQTKKNLYAADGTSTAVATRIADNFIIFHQNTKVFRDKYKNNHTDLGFDEENIFEIER
YKNCLLQREIEHIKNENSYNKIIGRINKKIKEYRDQKAKDTKLTKSDFPFFKNLDKQILGE
VEKEKQLIEKTREKTEEDVLIERFKEFIENNEERFTAAKKLMNAFCNGEFESEYEGIYLKN
KAINTISRRWFVSDRDFELKLPQQKSKNKSEKNEPKVKKFISIAEIKNAVEELDGDIFKAV
FYDKKIIAQGGSKLEQFLVIWKYEFEYLFRDIERENGEKLLGYDSCLKIAKQLGIFPQEKE
AREKATAVIKNYADAGLGIFQMMKYFSLDDKDRKNTPGQLSTNFYAEYDGYYKDFEFI
KYYNEFRNFITKKPFDEDKIKLNFENGALLKGWDENKEYDFMGVILKKEGRLYLGIMH
KNHRKLFQSMGNAKGDNANRYQKMIYKQIADASKDVPRLLLTSKKAMEKFKPSQEILR
IKKEKTFKRESKNFSLRDLHALIEYYRNCIPQYSNWSFYDFQFQDTGKYQNIKEFTDDVQ
KYGYKISFRDIDDEYINQALNEGKMYLFEVVNKDIYNTKNGSKNLHTLYFEHILSAENL
NDPVFKLSGMAEIFQRQPSVNEREKITTQKNQCILDKGDRAYKYRRYTEKKIMFHMSLV
LNTGKGEIKQVQFNKIINQRISSSDNEMRVNVIGIDRGEKNLLYYSVVKQNGEIIEQASLN
EINGVNYRDKLIEREKERLKNRQSWKPVVKIKDLKKGYISHVIHKICQLIEKYSAIVVLED
LNMRFKQIRGGIERSVYQQFEKALIDKLGYLVFKDNRDLRAPGGVLNGYQLSAPFVSFE
KMRKQTGILFYTQAEYTSKTDPITGFRKNVYISNSASLDKIKEAVKKFDAIGWDGKEQS
YFFKYNPYNLADEKYKNSTVSKEWAIFASAPRIRRQKGEDGYWKYDRVKVNEEFEKLL
KVWNFVNPKATDIKQEIIKKEKAGDLQGEKELDGRLRNFWHSFIYLFNLVLELRNSFSLQ
IKIKAGEVIAVDEGVDFIASPVKPFFTTPNPYIPSNLCWLAVENADANGAYNIARKGVMI
LKKIREHAKKDPEFKKLPNLFISNAEWDEAARDWGKYAGTTALNLDHKRPAATKKAGQ
AKKKKGSYPYDVPDYAYPYDVPDYAYPYDVPDYA
7- Smithella sp. SC_K08D17 (SsCpf1)
(SEQ ID NO: 32)
MQTLFENFTNQYPVSKTLRFELIPQGKTKDFIEQKGLLKKDEDRAEKYKKVK
NIIDEYHKDFIEKSLNGLKLDGLEKYKTLYLKQEKDDKDKKAFDKEKENLRKQIANAFR
NNEKFKTLFAKELIKNDLMSFACEEDKKNVKEFEAFTTYFTGFHQNRANMYVADEKRT
AIASRLIHENLPKFIDNIKIFEKMKKEAPELLSPFNQTLKDMKDVIKGTTLEEIFSLDYFNK
TLTQSGIDIYNSVIGGRTPEEGKTKIKGLNEYINTDFNQKQTDKKKRQPKFKQLYKQILSD
RQSLSFIAEAFKNDTEILEAIEKFYVNELLHFSNEGKSTNVLDAIKNAVSNLESFNLTKMY
FRSGASLTDVSRKVFGEWSIINRALDNYYATTYPIKPREKSEKYEERKEKWLKQDFNVS
LIQTAIDEYDNETVKGKNSGKVIADYFAKFCDDKETDLIQKVNEGYIAVKDLLNTPCPEN
EKLGSNKDQVKQIKAFMDSIMDIMHFVRPLSLKDTDKEKDETFYSLFTPLYDHLTQTIAL
YNKVRNYLTQKPYSTEKIKLNFENSTLLGGWDLNKETDNTAIILRKDNLYYLGIMDKRH
NRIFRNVPKADKKDFCYEKMVYKLLPGANKMLPKVFFSQSRIQEFTPSAKLLENYANET
HKKGDNFNLNHCHKLIDFFKDSINKHEDWKNFDFRFSATSTYADLSGFYHEVEHQGYKI
SFQSVADSFIDDLVNEGKLYLFQIYNKDFSPFSKGKPNLHTLYWKMLFDENNLKDVVYK
LNGEAEVFYRKKSIAEKNTTIHKANESIINKNPDNPKATSTFNYDIVKDKRYTIDKFQFHI
PITMNFKAEGIFNMNQRVNQFLKANPDINIIGIDRGERHLLYYALINQKGKILKQDTLNVI
ANEKQKVDYHNLLDKKEGDRATARQEWGVIETIKELKEGYLSQVIHKLTDLMIENNAII
VMEDLNFGFKRGRQKVEKQVYQKFEKMLIDKLNYLVDKNKKANELGGLLNAFQLANK
FESFQKMGKQNGFIFYVPAWNTSKTDPATGFIDFLKPRYENLNQAKDFFEKFDSIRLNSK
ADYFEFAFDFKNFTEKADGGRTKWTVCTTNEDRYAWNRALNNNRGSQEKYDITAELK
SLFDGKVDYKSGKDLKQQIASQESADFFKALMKNLSITLSLRHNNGEKGDNEQDYILSP
VADSKGRFFDSRKADDDMPKNADANGAYHIALKGLWCLEQISKTDDLKKVKLAISNKE
WLEFVQTLKGKRPAATKKAGQAKKKKGSYPYDVPDYAYPYDVPDYAYPYDVPDYA
8- Acidaminococcus sp. BV3L6 (AsCpf1)
(SEQ ID NO: 33)
MTQFEGFTNLYQVSKTLRFELIPQGKTLKHIQEQGFIEEDKARNDHYKELKPII
DRIYKTYADQCLQLVQLDWENLSAAIDSYRKEKTEETRNALIEEQATYRNAIHDYFIGRT
DNLTDAINKRHAEIYKGLFKAELFNGKVLKQLGTVTTTEHENALLRSFDKFTTYFSGFYE
NRKNVFSAEDISTAIPHRIVQDNFPKFKENCHIFTRLITAVPSLREHFENVKKAIGIFVSTSI
EEVFSFPFYNQLLTQTQIDLYNQLLGGISREAGTEKIKGLNEVLNLAIQKNDETAHIIASLP
HRFIPLFKQILSDRNTLSFILEEFKSDEEVIQSFCKYKTLLRNENVLETAEALFNELNSIDLT
HIFISHKKLETISSALCDHWDTLRNALYERRISELTGKITKSAKEKVQRSLKHEDINLQEII
SAAGKELSEAFKQKTSEILSHAHAALDQPLPTTLKKQEEKEILKSQLDSLLGLYHLLDWF
AVDESNEVDPEFSARLTGIKLEMEPSLSFYNKARNYATKKPYSVEKFKLNFQMPTLASG
WDVNKEKNNGAILFVKNGLYYLGIMPKQKGRYKALSFEPTEKTSEGFDKMYYDYFPD
AAKMIPKCSTQLKAVTAHFQTHTTPILLSNNFIEPLEITKEIYDLNNPEKEPKKFQTAYAK
KTGDQKGYREALCKWIDFTRDFLSKYTKTTSIDLSSLRPSSQYKDLGEYYAELNPLLYHI
SFQRIAEKEIMDAVETGKLYLFQIYNKDFAKGHHGKPNLHTLYWTGLFSPENLAKTSIKL
NGQAELFYRPKSRMKRMAHRLGEKMLNKKLKDQKTPIPDTLYQELYDYVNHRLSHDL
SDEARALLPNVITKEVSHEIIKDRRFTSDKFFFHVPITLNYQAANSPSKFNQRVNAYLKEH
PETPIIGIDRGERNLIYITVIDSTGKILEQRSLNTIQQFDYQKKLDNREKERVAARQAWSV
VGTIKDLKQGYLSQVIHEIVDLMIHYQAVVVLENLNFGFKSKRTGIAEKAVYQQFEKML
IDKLNCLVLKDYPAEKVGGVLNPYQLTDQFTSFAKMGTQSGFLFYVPAPYTSKIDPLTG
FVDPFVWKTIKNHESRKHFLEGFDFLHYDVKTGDFILHFKMNRNLSFQRGLPGFMPAW
DIVFEKNETQFDAKGTPFIAGKRIVPVIENHRFTGRYRDLYPANELIALLEEKGIVFRDGS
NILPKLLENDDSHAIDTMVALIRSVLQMRNSNAATGEDYINSPVRDLNGVCFDSRFQNPE
WPMDADANGAYHIALKGQLLLNHLKESKDLKLQNGISNQDWLAYIQELRNKRPAATKK
AGQAKKKKGSYPYDVPDYAYPYDVPDYAYPYDVPDYA
9- Lachnospiraceae bacterium MA2020 (Lb2Cpf1)
(SEQ ID NO: 34)
MYYESLTKQYPVSKTIRNELIPIGKTLDNIRQNNILESDVKRKQNYEHVKGILD
EYHKQLINEALDNCTLPSLKIAAEIYLKNQKEVSDREDFNKTQDLLRKEVVEKLKAHEN
FTKIGKKDILDLLEKLPSISEDDYNALESFRNFYTYFTSYNKVRENLYSDKEKSSTVAYRL
INENFPKFLDNVKSYRFVKTAGILADGLGEEEQDSLFIVETFNKTLTQDGIDTYNSQVGKI
NSSINLYNQKNQKANGFRKIPKMKMLYKQILSDREESFIDEFQSDEVLIDNVESYGSVLIE
SLKSSKVSAFFDALRESKGKNVYVKNDLAKTAMSNIVFENWRTFDDLLNQEYDLANEN
KKKDDKYFEKRQKELKKNKSYSLEHLCNLSEDSCNLIENYIHQISDDIENIIINNETFLRIV
INEHDRSRKLAKNRKAVKAIKDFLDSIKVLERELKLINSSGQELEKDLIVYSAHEELLVEL
KQVDSLYNMTRNYLTKKPFSTEKVKLNFNRSTLLNGWDRNKETDNLGVLLLKDGKYY
LGIMNTSANKAFVNPPVAKTEKVFKKVDYKLLPVPNQMLPKVFFAKSNIDFYNPSSEIYS
NYKKGTHKKGNMFSLEDCHNLIDFFKESISKHEDWSKFGFKFSDTASYNDISEFYREVE
KQGYKLTYTDIDETYINDLIERNELYLFQIYNKDFSMYSKGKLNLHTLYFMMLFDQRNI
DDVVYKLNGEAEVFYRPASISEDELIIHKAGEEIKNKNPNRARTKETSTFSYDIVKDKRY
SKDKFTLHIPITMNFGVDEVKRFNDAVNSAIRIDENVNVIGIDRGERNLLYVVVIDSKGNI
LEQISLNSIINKEYDIETDYHALLDEREGGRDKARKDWNTVENIRDLKAGYLSQVVNVV
AKLVLKYNAIICLEDLNFGFKRGRQKVEKQVYQKFEKMLIDKLNYLVIDKSREQTSPKE
LGGALNALQLTSKFKSFKELGKQSGVIYYVPAYLTSKIDPTTGFANLFYMKCENVEKSK
RFFDGFDFIRFNALENVFEFGFDYRSFTQRACGINSKWTVCTNGERIIKYRNPDKNNMFD
EKVVVVTDEMKNLFEQYKIPYEDGRNVKDMIISNEEAEFYRRLYRLLQQTLQMRNSTSD
GTRDYIISPVKNKREAYFNSELSDGSVPKDADANGAYNIARKGLWVLEQIRQKSEGEKI
NLAMTNAEWLEYAQTHLLKRPAATKKAGQAKKKKGSYPYDVPDYAYPYDVPDYAYPY
DVPDYA
10- Candidatus Methanoplasma termitum (CMtCpf1)
(SEQ ID NO: 35)
MNNYDEFTKLYPIQKTIRFELKPQGRTMEHLETFNFFEEDRDRAEKYKILKEA
IDEYHKKFIDEHLTNMSLDWNSLKQISEKYYKSREEKDKKVFLSEQKRMRQEIVSEFKK
DDRFKDLFSKKLFSELLKEEIYKKGNHQEIDALKSFDKFSGYFIGLHENRKNMYSDGDEI
TAISNRIVNENFPKFLDNLQKYQEARKKYPEWIIKAESALVAHNIKMDEVFSLEYFNKVL
NQEGIQRYNLALGGYVTKSGEKMMGLNDALNLAHQSEKSSKGRIHMTPLFKQILSEKES
FSYIPDVFTEDSQLLPSIGGFFAQIENDKDGNIFDRALELISSYAEYDTERIYIRQADINRVS
NVIFGEWGTLGGLMREYKADSINDINLERTCKKVDKWLDSKEFALSDVLEAIKRTGNN
DAFNEYISKMRTAREKIDAARKEMKFISEKISGDEESIHIIKTLLDSVQQFLHFFNLFKAR
QDIPLDGAFYAEFDEVHSKLFAIVPLYNKVRNYLTKNNLNTKKIKLNFKNPTLANGWDQ
NKVYDYASLIFLRDGNYYLGIINPKRKKNIKFEQGSGNGPFYRKMVYKQIPGPNKNLPR
VFLTSTKGKKEYKPSKEIIEGYEADKHIRGDKFDLDFCHKLIDFFKESIEKHKDWSKFNF
YFSPTESYGDISEFYLDVEKQGYRMHFENISAETIDEYVEKGDLFLFQIYNKDFVKAATG
KKDMHTIYWNAAFSPENLQDVVVKLNGEAELFYRDKSDIKEIVHREGEILVNRTYNGRT
PVPDKIHKKLTDYHNGRTKDLGEAKEYLDKVRYFKAHYDITKDRRYLNDKIYFHVPLT
LNFKANGKKNLNKMVIEKFLSDEKAHIIGIDRGERNLLYYSIIDRSGKIIDQQSLNVIDGF
DYREKLNQREIEMKDARQSWNAIGKIKDLKEGYLSKAVHEITKMAIQYNAIVVMEELN
YGFKRGRFKVEKQIYQKFENMLIDKMNYLVFKDAPDESPGGVLNAYQLTNPLESFAKL
GKQTGILFYVPAAYTSKIDPTTGFVNLFNTSSKTNAQERKEFLQKFESISYSAKDGGIFAF
AFDYRKFGTSKTDHKNVWTAYTNGERMRYIKEKKRNELFDPSKEIKEALTSSGIKYDGG
QNILPDILRSNNNGLIYTMYSSFIAAIQMRVYDGKEDYIISPIKNSKGEFFRTDPKRRELPI
DADANGAYNIALRGELTMRAIAEKFDPDSEKMAKLELKHKDWFEFMQTRGDKRPAATK
KAGQAKKKKGSYPYDVPDYAYPYDVPDYAYPYDVPDYA
11- Eubacterium eligens (EeCpf1)
(SEQ ID NO: 36)
MNGNRSIVYREFVGVIPVAKTLRNELRPVGHTQEHIIQNGLIQEDELRQEKST
ELKNIMDDYYREYIDKSLSGVTDLDFTLLFELMNLVQSSPSKDNKKALEKEQSKMREQI
CTHLQSDSNYKNIFNAKLLKEILPDFIKNYNQYDVKDKAGKLETLALFNGFSTYFTDFFE
KRKNVFTKEAVSTSIAYRIVHENSLIFLANMTSYKKISEKALDEIEVIEKNNQDKMGDWE
LNQIFNPDFYNMVLIQSGIDFYNEICGVVNAHMNLYCQQTKNNYNLFKMRKLHKQILA
YTSTSFEVPKMFEDDMSVYNAVNAFIDETEKGNIIGKLKDIVNKYDELDEKRIYISKDFY
ETLSCFMSGNWNLITGCVENFYDENIHAKGKSKEEKVKKAVKEDKYKSINDVNDLVEK
YIDEKERNEFKNSNAKQYIREISNIITDTETAHLEYDDHISLIESEEKADEMKKRLDMYM
NMYHWAKAFIVDEVLDRDEMFYSDIDDIYNILENIVPLYNRVRNYVTQKPYNSKKIKLN
FQSPTLANGWSQSKEFDNNAIILIRDNKYYLAIFNAKNKPDKKIIQGNSDKKNDNDYKK
MVYNLLPGANKMLPKVFLSKKGIETFKPSDYIISGYNAHKHIKTSENFDISFCRDLIDYFK
NSIEKHAEWRKYEFKFSATDSYSDISEFYREVEMQGYRIDWTYISEADINKLDEEGKIYL
FQIYNKDFAENSTGKENLHTMYFKNIFSEENLKDIIIKLNGQAELFYRRASVKNPVKHKK
DSVLVNKTYKNQLDNGDVVRIPIPDDIYNEIYKMYNGYIKESDLSEAAKEYLDKVEVRT
AQKDIVKDYRYTVDKYFIHTPITINYKVTARNNVNDMVVKYIAQNDDIHVIGIDRGERN
LIYISVIDSHGNIVKQKSYNILNNYDYKKKLVEKEKTREYARKNWKSIGNIKELKEGYIS
GVVHEIAMLIVEYNAIIAMEDLNYGFKRGRFKVERQVYQKFESMLINKLNYFASKEKSV
DEPGGLLKGYQLTYVPDNIKNLGKQCGVIFYVPAAFTSKIDPSTGFISAFNFKSISTNASR
KQFFMQFDEIRYCAEKDMFSFGFDYNNFDTYNITMGKTQWTVYTNGERLQSEFNNARR
TGKTKSINLTETIKLLLEDNEINYADGHDIRIDMEKMDEDKKSEFFAQLLSLYKLTVQMR
NSYTEAEEQENGISYDKIISPVINDEGEFFDSDNYKESDDKECKMPKDADANGAYCIALK
GLYEVLKIKSEWTEDGFDRNCLKLPHAEWLDFIQNKRYEKRPAATKKAGQAKKKKGSYP
YDVPDYAYPYDVPDYAYPYDVPDYA
12- Moraxella bovoculi 237 (MbCpf1)
(SEQ ID NO: 37)
MLFQDFTHLYPLSKTVRFELKPIDRTLEHIHAKNFLSQDETMADMHQKVKVI
LDDYHRDFIADMMGEVKLTKLAEFYDVYLKFRKNPKDDELQKQLKDLQAVLRKEIVKP
IGNGGKYKAGYDRLFGAKLFKDGKELGDLAKFVIAQEGESSPKLAHLAHFEKFSTYFTG
FHDNRKNMYSDEDKHTAIAYRLIHENLPRFIDNLQILTTIKQKHSALYDQIINELTASGLD
VSLASHLDGYHKLLTQEGITAYNTLLGGISGEAGSPKIQGINELINSHHNQHCHKSERIAK
LRPLHKQILSDGMSVSFLPSKFADDSEMCQAVNEFYRHYADVFAKVQSLFDGFDDHQK
DGIYVEHKNLNELSKQAFGDFALLGRVLDGYYVDVVNPEFNERFAKAKTDNAKAKLT
KEKDKFIKGVHSLASLEQAIEHYTARHDDESVQAGKLGQYFKHGLAGVDNPIQKIHNNH
STIKGFLERERPAGERALPKIKSGKNPEMTQLRQLKELLDNALNVAHFAKLLTTKTTLDN
QDGNFYGEFGVLYDELAKIPTLYNKVRDYLSQKPFSTEKYKLNFGNPTLLNGWDLNKE
KDNFGVILQKDGCYYLALLDKAHKKVFDNAPNTGKSIYQKMIYKYLEVRKQFPKVFFS
KEAIAINYHPSKELVEIKDKGRQRSDDERLKLYRFILECLKIHPKYDKKFEGAIGDIQLFK
KDKKGREVPISEKDLFDKINGIFSSKPKLEMEDFFIGEFKRYNPSQDLVDQYNIYKKIDSN
DNRKKENFYNNHPKFKKDLVRYYYESMCKHEEWEESFEFSKKLQDIGCYVDVNELFTE
IETRRLNYKISFCNINADYIDELVEQGQLYLFQIYNKDFSPKAHGKPNLHTLYFKALFSED
NLADPIYKLNGEAQIFYRKASLDMNETTIHRAGEVLENKNPDNPKKRQFVYDIIKDKRY
TQDKFMLHVPITMNFGVQGMTIKEFNKKVNQSIQQYDEVNVIGIDRGERHLLYLTVINS
KGEILEQCSLNDITTASANGTQMTTPYHKILDKREIERLNARVGWGEIETIKELKSGYLSH
VVHQISQLMLKYNAIVVLEDLNFGFKRGRFKVEKQIYQNFENALIKKLNHLVLKDKAD
DEIGSYKNALQLTNNFTDLKSIGKQTGFLFYVPAWNTSKIDPETGFVDLLKPRYENIAQS
QAFFGKFDKICYNADKDYFEFHIDYAKFTDKAKNSRQIWTICSHGDKRYVYDKTANQN
KGAAKGINVNDELKSLFARHHINEKQPNLVMDICQNNDKEFHKSLMYLLKTLLALRYS
NASSDEDFILSPVANDEGVFFNSALADDTQPQNADANGAYHIALKGLWLLNELKNSDD
LNKVKLAIDNQTWLNFAQNRKRPAATKKAGQAKKKKGSYPYDVPDYAYPYDVPDYAY
PYDVPDYA
13- Leptospira inadai (LiCpf1)
(SEQ ID NO: 38)
MEDYSGFVNIYSIQKTLRFELKPVGKTLEHIEKKGFLKKDKIRAEDYKAVKKII
DKYHRAYIEEVFDSVLHQKKKKDKTRFSTQFIKEIKEFSELYYKTEKNIPDKERLEALSE
KLRKMLVGAFKGEFSEEVAEKYKNLFSKELIRNEIEKFCETDEERKQVSNFKSFTTYFTG
FHSNRQNIYSDEKKSTAIGYRIIHQNLPKFLDNLKIIESIQRRFKDFPWSDLKKNLKKIDKN
IKLTEYFSIDGFVNVLNQKGIDAYNTILGGKSEESGEKIQGLNEYINLYRQKNNIDRKNLP
NVKILFKQILGDRETKSFIPEAFPDDQSVLNSITEFAKYLKLDKKKKSIIAELKKFLSSFNR
YELDGIYLANDNSLASISTFLFDDWSFIKKSVSFKYDESVGDPKKKIKSPLKYEKEKEKW
LKQKYYTISFLNDAIESYSKSQDEKRVKIRLEAYFAEFKSKDDAKKQFDLLERIEEAYAIV
EPLLGAEYPRDRNLKADKKEVGKIKDFLDSIKSLQFFLKPLLSAEIFDEKDLGFYNQLEG
YYEEIDSIGHLYNKVRNYLTGKIYSKEKFKLNFENSTLLKGWDENREVANLCVIFREDQ
KYYLGVMDKENNTILSDIPKVKPNELFYEKMVYKLIPTPHMQLPRIIFSSDNLSIYNPSKSI
LKIREAKSFKEGKNFKLKDCHKFIDFYKESISKNEDWSRFDFKFSKTSSYENISEFYREVE
RQGYNLDFKKVSKFYIDSLVEDGKLYLFQIYNKDFSIFSKGKPNLHTIYFRSLFSKENLKD
VCLKLNGEAEMFFRKKSINYDEKKKREGHHPELFEKLKYPILKDKRYSEDKFQFHLPISL
NFKSKERLNFNLKVNEFLKRNKDINIIGIDRGERNLLYLVMINQKGEILKQTLLDSMQSG
KGRPEINYKEKLQEKEIERDKARKSWGTVENIKELKEGYLSIVIHQISKLMVENNAIVVL
EDLNIGFKRGRQKVERQVYQKFEKMLIDKLNFLVFKENKPTEPGGVLKAYQLTDEFQSF
EKLSKQTGFLFYVPSWNTSKIDPRTGFIDFLHPAYENIEKAKQWINKFDSIRFNSKMDWF
EFTADTRKFSENLMLGKNRVWVICTTNVERYFTSKTANSSIQYNSIQITEKLKELFVDIPF
SNGQDLKPEILRKNDAVFFKSLLFYIKTTLSLRQNNGKKGEEEKDFILSPVVDSKGRFFNS
LEASDDEPKDADANGAYHIALKGLMNLLVLNETKEENLSRPKWKIKNKDWLEFVWER
NRKRPAATKKAGQAKKKKGSYPYDVPDYAYPYDVPDYAYPYDVPDYA
14- Lachnospiraceae bacterium ND2006 (LbCpf1)
(SEQ ID NO: 39)
MSKLEKFTNCYSLSKTLRFKAIPVGKTQENIDNKRLLVEDEKRAEDYKGVKK
LLDRYYLSFINDVLHSIKLKNLNNYISLFRKKTRTEKENKELENLEINLRKEIAKAFKGNE
GYKSLFKKDIIETILPEFLDDKDEIALVNSFNGFTTAFTGFFDNRENMFSEEAKSTSIAFRC
INENLTRYISNMDIFEKVDAIFDKHEVQEIKEKILNSDYDVEDFFEGEFFNFVLTQEGIDV
YNAIIGGFVTESGEKIKGLNEYINLYNQKTKQKLPKFKPLYKQVLSDRESLSFYGEGYTS
DEEVLEVFRNTLNKNSEIFSSIKKLEKLFKNFDEYSSAGIFVKNGPAISTISKDIFGEWNVI
RDKWNAEYDDIHLKKKAVVTEKYEDDRRKSFKKIGSFSLEQLQEYADADLSVVEKLKE
IIIQKVDEIYKVYGSSEKLFDADFVLEKSLKKNDAVVAIMKDLLDSVKSFENYIKAFFGE
GKETNRDESFYGDFVLAYDILLKVDHIYDAIRNYVTQKPYSKDKFKLYFQNPQFMGGW
DKDKETDYRATILRYGSKYYLAIMDKKYAKCLQKIDKDDVNGNYEKINYKLLPGPNKM
LPKVFFSKKWMAYYNPSEDIQKIYKNGTFKKGDMFNLNDCHKLIDFFKDSISRYPKWSN
AYDFNFSETEKYKDIAGFYREVEEQGYKVSFESASKKEVDKLVEEGKLYMFQIYNKDFS
DKSHGTPNLHTMYFKLLFDENNHGQIRLSGGAELFMRRASLKKEELVVHPANSPIANKN
PDNPKKTTTLSYDVYKDKRFSEDQYELHIPIAINKCPKNIFKINTEVRVLLKHDDNPYVIG
IDRGERNLLYIVVVDGKGNIVEQYSLNEIINNFNGIRIKTDYHSLLDKKEKERFEARQNW
TSIENIKELKAGYISQVVHKICELVEKYDAVIALEDLNSGFKNSRVKVEKQVYQKFEKML
IDKLNYMVDKKSNPCATGGALKGYQITNKFESFKSMSTQNGFIFYIPAWLTSKIDPSTGF
VNLLKTKYTSIADSKKFISSFDRIMYVPEEDLFEFALDYKNFSRTDADYIKKWKLYSYGN
RIRIFRNPKKNNVFDWEEVCLTSAYKELFNKYGINYQQGDIRALLCEQSDKAFYSSFMA
LMSLMLQMRNSITGRTDVDFLISPVKNSDGIFYDSRNYEAQENAILPKNADANGAYNIA
RKVLWAIGQFKKAEDEKLDKVKIAISNKEWLEYAQTSVKHKRPAATKKAGQAKKKKGS
YPYDVPDYAYPYDVPDYAYPYDVPDYA
15- Porphyromonas crevioricanis (PcCpf1)
(SEQ ID NO: 40)
MDSLKDFTNLYPVSKTLRFELKPVGKTLENIEKAGILKEDEHRAESYRRVKKI
IDTYHKVFIDSSLENMAKMGIENEIKAMLQSFCELYKKDHRTEGEDKALDKIRAVLRGLI
VGAFTGVCGRRENTVQNEKYESLFKEKLIKEILPDFVLSTEAESLPFSVEEATRSLKEFDS
FTSYFAGFYENRKNIYSTKPQSTAIAYRLIHENLPKFIDNILVFQKIKEPIAKELEHIRADFS
AGGYIKKDERLEDIFSLNYYIHVLSQAGIEKYNALIGKIVTEGDGEMKGLNEHINLYNQQ
RGREDRLPLFRPLYKQILSDREQLSYLPESFEKDEELLRALKEFYDHIAEDILGRTQQLMT
SISEYDLSRIYVRNDSQLTDISKKMLGDWNAIYMARERAYDHEQAPKRITAKYERDRIK
ALKGEESISLANLNSCIAFLDNVRDCRVDTYLSTLGQKEGPHGLSNLVENVFASYHEAE
QLLSFPYPEENNLIQDKDNVVLIKNLLDNISDLQRFLKPLWGMGDEPDKDERFYGEYNYI
RGALDQVIPLYNKVRNYLTRKPYSTRKVKLNFGNSQLLSGWDRNKEKDNSCVILRKGQ
NFYLAIMNNRHKRSFENKMLPEYKEGEPYFEKMDYKFLPDPNKMLPKVFLSKKGIEIYK
PSPKLLEQYGHGTHKKGDTFSMDDLHELIDFFKHSIEAHEDWKQFGFKFSDTATYENVS
SFYREVEDQGYKLSFRKVSESYVYSLIDQGKLYLFQIYNKDFSPCSKGTPNLHTLYWRM
LFDERNLADVIYKLDGKAEIFFREKSLKNDHPTHPAGKPIKKKSRQKKGEESLFEYDLVK
DRRYTMDKFQFHVPITMNFKCSAGSKVNDMVNAHIREAKDMHVIGIDRGERNLLYICVI
DSRGTILDQISLNTINDIDYHDLLESRDKDRQQEHRNWQTIEGIKELKQGYLSQAVHRIA
ELMVAYKAVVALEDLNMGFKRGRQKVESSVYQQFEKQLIDKLNYLVDKKKRPEDIGG
LLRAYQFTAPFKSFKEMGKQNGFLFYIPAWNTSNIDPTTGFVNLFHVQYENVDKAKSFF
QKFDSISYNPKKDWFEFAFDYKNFTKKAEGSRSMWILCTHGSRIKNFRNSQKNGQWDS
EEFALTEAFKSLFVRYEIDYTADLKTAIVDEKQKDFFVDLLKLFKLTVQMRNSWKEKDL
DYLISPVAGADGRFFDTREGNKSLPKDADANGAYNIALKGLWALRQIRQTSEGGKLKL
AISNKEWLQFVQERSYEKDKRPAATKKAGQAKKKKGSYPYDVPDYAYPYDVPDYAYPY
DVPDYA
16- Prevotella disiens (PdCpf1)
(SEQ ID NO: 41)
MENYQEFTNLFQLNKTLRFELKPIGKTCELLEEGKIFASGSFLEKDKVRADNV
SYVKKEIDKKHKIFIEETLSSFSISNDLLKQYFDCYNELKAFKKDCKSDEEEVKKTALRN
KCTSIQRAMREAISQAFLKSPQKKLLAIKNLIENVFKADENVQHFSEFTSYFSGFETNREN
FYSDEEKSTSIAYRLVHDNLPIFIKNIYIFEKLKEQFDAKTLSEIFENYKLYVAGSSLDEVF
SLEYFNNTLTQKGIDNYNAVIGKIVKEDKQEIQGLNEHINLYNQKHKDRRLPFFISLKKQI
LSDREALSWLPDMFKNDSEVIKALKGFYIEDGFENNVLTPLATLLSSLDKYNLNGIFIRN
NEALSSLSQNVYRNFSIDEAIDANAELQTFNNYELIANALRAKIKKETKQGRKSFEKYEE
YIDKKVKAIDSLSIQEINELVENYVSEFNSNSGNMPRKVEDYFSLMRKGDFGSNDLIENI
KTKLSAAEKLLGTKYQETAKDIFKKDENSKLIKELLDATKQFQHFIKPLLGTGEEADRDL
VFYGDFLPLYEKFEELTLLYNKVRNRLTQKPYSKDKIRLCFNKPKLMTGWVDSKTEKSD
NGTQYGGYLFRKKNEIGEYDYFLGISSKAQLFRKNEAVIGDYERLDYYQPKANTIYGSA
YEGENSYKEDKKRLNKVIIAYIEQIKQTNIKKSIIESISKYPNISDDDKVTPSSLLEKIKKVSI
DSYNGILSFKSFQSVNKEVIDNLLKTISPLKNKAEFLDLINKDYQIFTEVQAVIDEICKQKT
FIYFPISNVELEKEMGDKDKPLCLFQISNKDLSFAKTFSANLRKKRGAENLHTMLFKALM
EGNQDNLDLGSGAIFYRAKSLDGNKPTHPANEAIKCRNVANKDKVSLFTYDIYKNRRY
MENKFLFHLSIVQNYKAANDSAQLNSSATEYIRKADDLHIIGIDRGERNLLYYSVIDMKG
NIVEQDSLNIIRNNDLETDYHDLLDKREKERKANRQNWEAVEGIKDLKKGYLSQAVHQI
AQLMLKYNAIIALEDLGQMFVTRGQKIEKAVYQQFEKSLVDKLSYLVDKKRPYNELGGI
LKAYQLASSITKNNSDKQNGFLFYVPAWNTSKIDPVTGFTDLLRPKAMTIKEAQDFFGA
FDNISYNDKGYFEFETNYDKFKIRMKSAQTRWTICTFGNRIKRKKDKNYWNYEEVELTE
EFKKLFKDSNIDYENCNLKEEIQNKDNRKFFDDLIKLLQLTLQMRNSDDKGNDYIISPVA
NAEGQFFDSRNGDKKLPLDADANGAYNIARKGLWNIRQIKQTKNDKKLNLSISSTEWL
DFVREKPYLKKRPAATKKAGQAKKKKGSYPYDVPDYAYPYDVPDYAYPYDVPDYA
17- Porphyromonas macacae (PmCpf1)
(SEQ ID NO: 42)
MKTQHFFEDFTSLYSLSKTIRFELKPIGKTLENIKKNGLIRRDEQRLDDYEKLK
KVIDEYHEDFIANILSSFSFSEEILQSYIQNLSESEARAKIEKTMRDTLAKAFSEDERYKSIF
KKELVKKDIPVWCPAYKSLCKKFDNFTTSLVPFHENRKNLYTSNEITASIPYRIVHVNLP
KFIQNIEALCELQKKMGADLYLEMMENLRNVWPSFVKTPDDLCNLKTYNHLMVQSSIS
EYNRFVGGYSTEDGTKHQGINEWINIYRQRNKEMRLPGLVFLHKQILAKVDSSSFISDTL
ENDDQVFCVLRQFRKLFWNTVSSKEDDAASLKDLFCGLSGYDPEAIYVSDAHLATISKN
IFDRWNYISDAIRRKTEVLMPRKKESVERYAEKISKQIKKRQSYSLAELDDLLAHYSEES
LPAGFSLLSYFTSLGGQKYLVSDGEVILYEEGSNIWDEVLIAFRDLQVILDKDFTEKKLG
KDEEAVSVIKKALDSALRLRKFFDLLSGTGAEIRRDSSFYALYTDRMDKLKGLLKMYD
KVRNYLTKKPYSIEKFKLHFDNPSLLSGWDKNKELNNLSVIFRQNGYYYLGIMTPKGKN
LFKTLPKLGAEEMFYEKMEYKQIAEPMLMLPKVFFPKKTKPAFAPDQSVVDIYNKKTFK
TGQKGFNKKDLYRLIDFYKEALTVHEWKLFNFSFSPTEQYRNIGEFFDEVREQAYKVSM
VNVPASYIDEAVENGKLYLFQIYNKDFSPYSKGIPNLHTLYWKALFSEQNQSRVYKLCG
GGELFYRKASLHMQDTTVHPKGISIHKKNLNKKGETSLFNYDLVKDKRFTEDKFFFHVP
ISINYKNKKITNVNQMVRDYIAQNDDLQIIGIDRGERNLLYISRIDTRGNLLEQFSLNVIES
DKGDLRTDYQKILGDREQERLRRRQEWKSIESIKDLKDGYMSQVVHKICNMVVEHKAI
VVLENLNLSFMKGRKKVEKSVYEKFERMLVDKLNYLVVDKKNLSNEPGGLYAAYQLT
NPLFSFEELHRYPQSGILFFVDPWNTSLTDPSTGFVNLLGRINYTNVGDARKFFDRFNAIR
YDGKGNILFDLDLSRFDVRVETQRKLWTLTTFGSRIAKSKKSGKWMVERIENLSLCFLE
LFEQFNIGYRVEKDLKKAILSQDRKEFYVRLIYLFNLMMQIRNSDGEEDYILSPALNEKN
LQFDSRLIEAKDLPVDADANGAYNVARKGLMVVQRIKRGDHESIHRIGRAQWLRYVQE
GIVEKRPAATKKAGQAKKKKGSYPYDVPDYAYPYDVPDYAYPYDVPDYA
18- Thiomicrospira sp. XS5 (TsCpf1)
(SEQ ID NO: 43)
MTKTFDSEFFNLYSLQKTVRFELKPVGETASFVEDFKNEGLKRVVSEDERRA
VDYQKVKEIIDDYHRDFIEESLNYFPEQVSKDALEQAFHLYQKLKAAKVEEREKALKEW
EALQKKLREKVVKCFSDSNKARFSRIDKKELIKEDLINWLVAQNREDDIPTVETFNNFTT
YFTGFHENRKNIYSKDDHATAISFRLIHENLPKFFDNVISFNKLKEGFPELKFDKVKEDLE
VDYDLKHAFEIEYFVNFVTQAGIDQYNYLLGGKTLEDGTKKQGMNEQINLFKQQQTRD
KARQIPKLIPLFKQILSERTESQSFIPKQFESDQELFDSLQKLHNNCQDKFTVLQQAILGLA
EADLKKVFIKTSDLNALSNTIFGNYSVFSDALNLYKESLKTKKAQEAFEKLPAHSIHDLIQ
YLEQFNSSLDAEKQQSTDTVLNYFIKTDELYSRFIKSTSEAFTQVQPLFELEALSSKRRPP
ESEDEGAKGQEGFEQIKRIKAYLDTLMEAVHFAKPLYLVKGRKMIEGLDKDQSFYEAFE
MAYQELESLIIPIYNKARSYLSRKPFKADKFKINFDNNTLLSGWDANKETANASILFKKD
GLYYLGIMPKGKTFLFDYFVSSEDSEKLKQRRQKTAEEALAQDGESYFEKIRYKLLPGA
SKMLPKVFFSNKNIGFYNPSDDILRIRNTASHTKNGTPQKGHSKVEFNLNDCHKMIDFFK
SSIQKHPEWGSFGFTFSDTSDFEDMSAFYREVENQGYVISFDKIKETYIQSQVEQGNLYLF
QIYNKDFSPYSKGKPNLHTLYWKALFEEANLNNVVAKLNGEAEIFFRRHSIKASDKVVH
PANQAIDNKNPHTEKTQSTFEYDLVKDKRYTQDKFFFHVPISLNFKAQGVSKFNDKVNG
FLKGNPDVNIIGIDRGERHLLYFTVVNQKGEILVQESLNTLMSDKGHVNDYQQKLDKKE
QERDAARKSWTTVENIKELKEGYLSHVVHKLAHLIIKYNAIVCLEDLNFGFKRGRFKVE
KQVYQKFEKALIDKLNYLVFKEKELGEVGHYLTAYQLTAPFESFKKLGKQSGILFYVPA
DYTSKIDPTTGFVNFLDLRYQSVEKAKQLLSDFNAIRFNSVQNYFEFEIDYKKLTPKRKV
GTQSKWVICTYGDVRYQNRRNQKGHWETEEVNVTEKLKALFASDSKTTTVIDYANDD
NLIDVILEQDKASFFKELLWLLKLTMTLRHSKIKSEDDFILSPVKNEQGEFYDSRKAGEV
WPKDADANGAYHIALKGLWNLQQINQWEKGKTLNLAIKNQDWFSFIQEKPYQEKRPAA
TKKAGQAKKKKGSYPYDVPDYAYPYDVPDYAYPYDVPDYA
19- Moraxella bovoculi AAX08_00205 (Mb2Cpf1)
(SEQ ID NO: 44)
MLFQDFTHLYPLSKTVRFELKPIGRTLEHIHAKNFLSQDETMADMYQKVKVI
LDDYHRDFIADMMGEVKLTKLAEFYDVYLKFRKNPKDDGLQKQLKDLQAVLRKESVK
PIGSGGKYKTGYDRLFGAKLFKDGKELGDLAKFVIAQEGESSPKLAHLAHFEKFSTYFT
GFHDNRKNMYSDEDKHTAIAYRLIHENLPRFIDNLQILTTIKQKHSALYDQIINELTASGL
DVSLASHLDGYHKLLTQEGITAYNRIIGEVNGYTNKHNQICHKSERIAKLRPLHKQILSD
GMGVSFLPSKFADDSEMCQAVNEFYRHYTDVFAKVQSLFDGFDDHQKDGIYVEHKNL
NELSKQAFGDFALLGRVLDGYYVDVVNPEFNERFAKAKTDNAKAKLTKEKDKFIKGVH
SLASLEQAIEHHTARHDDESVQAGKLGQYFKHGLAGVDNPIQKIHNNHSTIKGFLERERP
AGERALPKIKSGKNPEMTQLRQLKELLDNALNVAHFAKLLTTKTTLDNQDGNFYGEFG
VLYDELAKIPTLYNKVRDYLSQKPFSTEKYKLNFGNPTLLNGWDLNKEKDNFGVILQKD
GCYYLALLDKAHKKVFDNAPNTGKNVYQKMVYKLLPGPNKMLPKVFFAKSNLDYYN
PSAELLDKYAKGTHKKGDNFNLKDCHALIDFFKAGINKHPEWQHFGFKFSPTSSYRDLS
DFYREVEPQGYQVKFVDINADYIDELVEQGKLYLFQIYNKDFSPKAHGKPNLHTLYFKA
LFSEDNLADPIYKLNGEAQIFYRKASLDMNETTIHRAGEVLENKNPDNPKKRQFVYDIIK
DKRYTQDKFMLHVPITMNFGVQGMTIKEFNKKVNQSIQQYDEVNVIGIDRGERHLLYLT
VINSKGEILEQRSLNDITTASANGTQVTTPYHKILDKREIERLNARVGWGEIETIKELKSG
YLSHVVHQINQLMLKYNAIVVLEDLNFGFKRGRFKVEKQIYQNFENALIKKLNHLVLKD
KADDEIGSYKNALQLTNNFTDLKSIGKQTGFLFYVPAWNTSKIDPETGFVDLLKPRYENI
AQSQAFFGKFDKICYNTDKGYFEFHIDYAKFTDKAKNSRQKWAICSHGDKRYVYDKTA
NQNKGAAKGINVNDELKSLFARYHINDKQPNLVMDICQNNDKEFHKSLMCLLKTLLAL
RYSNASSDEDFILSPVANDEGVFFNSALADDTQPQNADANGAYHIALKGLWLLNELKNS
DDLNKVKLAIDNQTWLNFAQNRKRPAATKKAGQAKKKKGSYPYDVPDYAYPYDVPDY
AYPYDVPDYA
20- Moraxella bovoculi AAX11_00205 (Mb3Cpf1)
(SEQ ID NO: 45)
MLFQDFTHLYPLSKTVRFELKPIGKTLEHIHAKNFLNQDETMADMYQKVKAI
LDDYHRDFIADMMGEVKLTKLAEFYDVYLKFRKNPKDDGLQKQLKDLQAVLRKEIVK
PIGNGGKYKAGYDRLFGAKLFKDGKELGDLAKFVIAQEGESSPKLAHLAHFEKFSTYFT
GFHDNRKNMYSDEDKHTAIAYRLIHENLPRFIDNLQILATIKQKHSALYDQIINELTASGL
DVSLASHLDGYHKLLTQEGITAYNTLLGGISGEAGSRKIQGINELINSHHNQHCHKSERIA
KLRPLHKQILSDGMGVSFLPSKFADDSEVCQAVNEFYRHYADVFAKVQSLFDGFDDYQ
KDGIYVEYKNLNELSKQAFGDFALLGRVLDGYYVDVVNPEFNERFAKAKTDNAKAKL
TKEKDKFIKGVHSLASLEQAIEHYTARHDDESVQAGKLGQYFKHGLAGVDNPIQKIHNN
HSTIKGFLERERPAGERALPKIKSDKSPEIRQLKELLDNALNVAHFAKLLTTKTTLHNQD
GNFYGEFGALYDELAKIATLYNKVRDYLSQKPFSTEKYKLNFGNPTLLNGWDLNKEKD
NFGVILQKDGCYYLALLDKAHKKVFDNAPNTGKSVYQKMIYKLLPGPNKMLPKVFFA
KSNLDYYNPSAELLDKYAQGTHKKGDNFNLKDCHALIDFFKAGINKHPEWQHFGFKFS
PTSSYQDLSDFYREVEPQGYQVKFVDINADYINELVEQGQLYLFQIYNKDFSPKAHGKP
NLHTLYFKALFSEDNLVNPIYKLNGEAEIFYRKASLDMNETTIHRAGEVLENKNPDNPK
KRQFVYDIIKDKRYTQDKFMLHVPITMNFGVQGMTIKEFNKKVNQSIQQYDEVNVIGID
RGERHLLYLTVINSKGEILEQRSLNDITTASANGTQMTTPYHKILDKREIERLNARVGWG
EIETIKELKSGYLSHVVHQISQLMLKYNAIVVLEDLNFGEKRGRFKVEKQIYQNFENALI
KKLNHLVLKDKADDEIGSYKNALQLTNNFTDLKSIGKQTGFLFYVPAWNTSKIDPETGF
VDLLKPRYENIAQSQAFFGKFDKICYNADRGYFEFHIDYAKFNDKAKNSRQIWKICSHG
DKRYVYDKTANQNKGATIGVNVNDELKSLFTRYHINDKQPNLVMDICQNNDKEFHKSL
MYLLKTLLALRYSNASSDEDFILSPVANDEGVFFNSALADDTQPQNADANGAYHIALKG
LWLLNELKNSDDLNKVKLAIDNQTWLNFAQNRKRPAATKKAGQAKKKKGSYPYDVPDY
AYPYDVPDYAYPYDVPDYA
21- Butyrivibrio sp. NC3005 (BsCpf1)
(SEQ ID NO: 46)
MYYQNLTKKYPVSKTIRNELIPIGKTLENIRKNNILESDVKRKQDYEHVKGIM
DEYHKQLINEALDNYMLPSLNQAAEIYLKKHVDVEDREEFKKTQDLLRREVTGRLKEH
ENYTKIGKKDILDLLEKLPSISEEDYNALESFRNFYTYFTSYNKVRENLYSDEEKSSTVAY
RLINENLPKFLDNIKSYAFVKAAGVLADCIEEEEQDALFMVETFNMTLTQEGIDMYNYQI
GKVNSAINLYNQKNHKVEEFKKIPKMKVLYKQILSDREEVFIGEFKDDETLLSSIGAYGN
VLMTYLKSEKINIFFDALRESEGKNVYVKNDLSKTTMSNIVFGSWSAFDELLNQEYDLA
NENKKKDDKYFEKRQKELKKNKSYTLEQMSNLSKEDISPIENYIERISEDIEKICIYNGEF
EKIVVNEHDSSRKLSKNIKAVKVIKDYLDSIKELEHDIKLINGSGQELEKNLVVYVGQEE
ALEQLRPVDSLYNLTRNYLTKKPFSTEKVKLNFNKSTLLNGWDKNKETDNLGILFFKDG
KYYLGIMNTTANKAFVNPPAAKTENVFKKVDYKLLPGSNKMLPKVFFAKSNIGYYNPS
TELYSNYKKGTHKKGPSFSIDDCHNLIDFFKESIKKHEDWSKFGFEFSDTADYRDISEFYR
EVEKQGYKLTFTDIDESYINDLIEKNELYLFQIYNKDFSEYSKGKLNLHTLYFMMLFDQR
NLDNVVYKLNGEAEVFYRPASIAENELVIHKAGEGIKNKNPNRAKVKETSTFSYDIVKD
KRYSKYKFTLHIPITMNFGVDEVRRFNDVINNALRTDDNVNVIGIDRGERNLLYVVVINS
EGKILEQISLNSIINKEYDIETNYHALLDEREDDRNKARKDWNTIENIKELKTGYLSQVVN
VVAKLVLKYNAIICLEDLNFGFKRGRQKVEKQVYQKFEKMLIEKLNYLVIDKSREQVSP
EKMGGALNALQLTSKFKSFAELGKQSGIIYYVPAYLTSKIDPTTGFVNLFYIKYENIEKA
KQFFDGFDFIRFNKKDDMFEFSFDYKSFTQKACGIRSKWIVYTNGERIIKYPNPEKNNLF
DEKVINVTDEIKGLFKQYRIPYENGEDIKEIIISKAEADFYKRLFRLLHQTLQMRNSTSDG
TRDYIISPVKNDRGEFFCSEFSEGTMPKDADANGAYNIARKGLWVLEQIRQKDEGEKVN
LSMTNAEWLKYAQLHLLKRPAATKKAGQAKKKKGSYPYDVPDYAYPYDVPDYAYPYD
VPDYA
Further Cpf1 orthologs include:
NCBI WP_055225123.1
(SEQ ID NO: 47)
MNNGTNNFQNFIGISSLQKTLRNALIPTETTQQFIVKNGIIKEDELRGENRQILK
DIMDDYYRGFISETLSSIDDIDWTSLFEKMEIQLKNGDNKDTLIKEQTEYRKAIHKKFAN
DDRFKNMFSAKLISDILPEFVIHNNNYSASEKEEKTQVIKLFSRFATSFKDYFKNRANCFS
ADDISSSSCHRIVNDNAEIFFSNALVYRRIVKSLSNDDINKISGDMKDSLKEMSLEEIYSY
EKYGEFITQEGISFYNDICGKVNSFMNLYCQKNKENKNLYKLQKLHKQILCIADTSYEVP
YKFESDEEVYQSVNGFLDNISSKHIVERLRKIGDNYNGYNLDKIYIVSKFYESVSQKTYR
DWETINTALEIHYNNILPGNGKSKADKVKKAVKNDLQKSITEINELVSNYKLCSDDNIKA
ETYIHEISHILNNFEAQELKYNPEIHLVESELKASELKNVLDVIMNAFHWCSVFMTEELV
DKDNNFYAELEEIYDEIYPVISLYNLVRNYVTQKPYSTKKIKLNFGIPTLADGWSKSKEY
SNNAIILMRDNLYYLGIFNAKNKPDKKIIEGNTSENKGDYKKMIYNLLPGPNKMIPKVFL
SSKTGVETYKPSAYILEGYKQNKHIKSSKDFDITFCHDLIDYFKNCIAIHPEWKNFGFDFS
DTSTYEDISGFYREVELQGYKIDWTYISEKDIDLLQEKGQLYLFQIYNKDFSKKSTGNDN
LHTMYLKNLFSEENLKDIVLKLNGEAEIFFRKSSIKNPIIHKKGSILVNRTYEAEEKDQFG
NQIVRKNIPENIYQELYKYFNDKSDKELSDEAAKLKNVVGHHEAATNIVKDYRYTYDK
YFLHMPITINFKANKTGFINDRILQYIAKEKDLHVIGIDRGERNLIYVSVIDTCGNIVEQKS
FNIVNGYDYQIKLKQQEGARQIARKEWKEIGKIKEIKEGYLSLVIHEISKMVIKYNAIIAM
EDLSYGFKKGRFKVERQVYQKFETMLINKLNYLVFKDISITENGGLLKGYQLTYIPDKLK
NVGHQCGCIFYVPAAYTSKIDPTTGFVNIFKFKDLTVDAKREFIKKFDSIRYDSEKNLFCF
TFDYNNFITQNTVMSKSSWSVYTYGVRIKRRFVNGRFSNESDTIDITKDMEKTLEMTDIN
WRDGHDLRQDIIDYEIVQHIFEIFRLTVQMRNSLSELEDRDYDRLISPVLNENNIFYDSAK
AGDALPKDADANGAYCTALKGLYEIKQITENWKEDGKFSRDKLKISNKDWFDFIQNKR
YL
NCBI WP_055237260.1
(SEQ ID NO: 48)
MNNGTNNFQNFIGISSLQKTLRNALIPTETTQQFIVKNGIIKEDELRGENRQILK
DIMDDYYRGFISETLSSIDDIDWTSLFEKMEIQLKNGDNKDTLIKEQAEKRKAIYKKFAD
DDRFKNMFSAKLISDILPEFVIHNNNYSASEKEEKTQVIKLFSRFATSFKDYFKNRANCFS
ADDISSSSCHRIVNDNAEIFFSNALVYRRIVKNLSNDDINKISGDMKDSLKEMSLDEIYSY
EKYGEFITQEGISFYNDICGKVNSFMNLYCQKNKENKNLYKLRKLHKQILCIADTSYEVP
YKFESDEEVYQSVNGFLDNISSKHIVERLRKIGDNYNGYNLDKIYIVSRFYESVSQKTYR
DWETINTALEIHYNNILPGNGKSKADKVKKAVKNDLQKSITEINELVSNYKLCPDDNIKA
ETYIHEISHILNNFEAQELKYNPEIHLVESELKASELKNVLDVIMNAFHWCSVFMTEELV
DKDNNFYAELEEIYDEIYPVISLYNLVRNYVTQKPYSTKKIKLNFGIPTLADGWSKSKEY
SNNAIILMRDNLYYLGIFNAKNKPDKKIIEGNTSENKGDYKKMIYNLLPGPNKMIPKVFL
SSKTGVETYKPSAYILEGYKQNKHLKSSKDFDITFCRDLIDYFKNCIAIHPEWKNFGFDFS
DTSTYEDISGFYREVELQGYKIDWTYISEKDIDLLQEKGQLYLFQIYNKDFSKKSTGNDN
LHTMYLKNLFSEENLKDIVLKLNGEAEIFFRKSSIKNPIIHKKGSILVNRTYEAEEKDQFG
NIQIVRKTIPENIYQELYKYFNDKSDKELSDEAAKLKNVVGHHEAATNIVKDYRYTYDK
YFLHMPITINFKANKTSFINDRILQYIAKENDLHVIGIDRGERNLIYVSVIDTCGNIVEQKS
FNIVNGYDYQIKLKQQEGARQIARKEWKEIGKIKEIKEGYLSLVIHEISKMVIKYNAIIAM
EDLSYGFKKGRFKVERQVYQKFETMLINKLNYLVFKDISITENGGLLKGYQLTYIPEKLK
NVGHQCGCIFYVPAAYTSKIDPTTGFANIFKFKDLTVDAKREFIKKFDSIRYDSEKNLFCF
TFDYNNFITQNTVMSKSSWSVYTYGVRIKRRFVNGRFSNESDTIDITKDMEKTLEMTDIN
WRDGHDLRQDIIDYEIVQHIFEIFKLTVQMRNSLSELEDRDYDRLISPVLNENNIFYDSAK
AGDALPKDADANGAYCTALKGLYEIKQITENWKEDGKFSRDKLKISNKDWFDFIQNKR
YL
NCBI WP_055272206.1
(SEQ ID NO: 49)
MNNGTNNFQNFIGISSLQKTLRNALTPTETTQQFIVKNGIIKEDELRGENRQIL
KDIMDDYYRGFISETLSSIDDIDWTSLFEKMEIQLKNGDNKDTLIKEQAEKRKAIYKKFA
DDDRFKNMFSAKLISDILPEFVIHNNNYSASEKEEKTQVIKLFSRFATSFKDYFKNRANCF
SADDISSSSCHRIVNDNAEIFFSNALVYRRIVKNLSNDDINKISGDMKDSLKKMSLEKIYS
YEKYGEFITQEGISFYNDICGKVNSFMNLYCQKNKENKNLYKLRKLHKQILCIADTSYEV
PYKFESDEEVYQSVNGFLDNISSKHIVERLRKIGDNYNGYNLDKIYIVSKFYESVSQKTY
RDWETINTALEIHYNNILPGNGKSKADKVKKAVKNDLQKSITEINELVSNYKLCPDDNIK
AETYIHEISHILNNFEAQELKYNPEIHLVESELKASELKNVLDVIMNAFHWCSVFMTEEL
VDKDNNFYAELEEIYDEIYPVISLYNLVRNYVTQKPYSTKKIKLNFGIPTLADGWSKSKE
YSNNAIILMRDNLYYLGIFNAKNKPEKKIIEGNTSENKGDYKKMIYNLLPGPNKMIPKVF
LSSKTGVETYKPSAYILEGYKQNKHLKSSKDFDITFCRDLIDYFKNCIAIHPEWKNFGFDF
SDTSTYEDISGFYREVELQGYKIDWTYISEKDIDLLQEKGQLYLFQIYNKDFSKKSTGND
NLHTMYLKNLFSEENLKDVVLKLNGEAEIFFRKSSIKNPIIHKKGSILVNRTYEAEEKDQF
GNIQIVRKTIPENIYQELYKYFNDKSDKELSDEAAKLKNAVGHHEAATNIVKDYRYTYD
KYFLHMPITINFKANKTSFINDRILQYIAKEKDLHVIGIDRGERNLIYVSVIDTCGNIVEQK
SFNIVNGYDYQIKLKQQEGARQIARKEWKEIGKIKEIKEGYLSLVIHEISKMVIKYNAIIA
MEDLSYGFKKGRFKVERQVYQKFETMLINKLNYLVFKDISITENGGLLKGYQLTYIPEK
LKNVGHQCGCIFYVPAAYTSKIDPTTGFVNIFKFKDLTVDAKREFIKKFDSIRYDSDKNL
FCFTFDYNNFITQNTVMSKSSWSVYTYGVRIKRRFVNGRFSNESDTIDITKDMEKTLEMT
DINWRDGHDLRQDIIDYEIVQHIFEIFKLTVQMRNSLSELEDRNYDRLISPVLNENNIFYD
SAKAGDALPKDADANGAYCIALKGLYEIKQITENWKEDGKFSRDKLKISNKDWFDFIQN
KRYL
GenBank OLA16049.1
(SEQ ID NO: 50)
MNNGTNNFQNFIGISSLQKTLRNALIPTETTQQFIVKNGIIKEDELRGKNRQIL
KDIMDDYYRGFISETLSSIDDIDWTSLFEKMEIQLKNGDNKDTLIKEQAEKRKAIYKKFA
DDDRFKNMFSAKLISDILPEFVIHNNNYSASEKKEKTQVIKLFSRFATSFKDYFKNRANC
FSADDISSSSCHRIVNDNAEIFFSNALVYRRIVKNLSNDDINKISGDMKDSLKEMSLEEIYS
YEKYGEFITQEGISFYNDICGKVNSFMNLYCQKNKENKNLYKLRKLHKQILCIADTSYEV
PYKFESDEEVYQSVNGFLDNISSKHIVERLRKIGDNYNDYNLDKIYIVSKFYESVSQKTY
RDWETINTALEIHYNNILPGNGKSKADKVKKAVKNDLQKSITEINELVSNYKLCSDDNIK
AETYIHEISHILNNFEAHELKYNPEIHLVESELKASELKNVLDIIMNAFHWCSVFMTEELV
DKDNNFYAELEEIYDEIYPVISLYNLVRNYVTQKPYSTKKIKLNFGIPTLADGWSKSKEY
SNNAIILMRDNLYYLGIFNAKNKPDKKIIEGNTSENKGDYKKMIYNLLPGPNKMIPKVFL
SSKTGVETYKPSAYILEGYKQNKHLKSSKDFDITFCHDLIDYFKNCIAIHPEWKNFGFDFS
DTSAYEDISGFYREVELQGYKIDWTYISEKDIDLLQEKGQLYLFQIYNKDFSKKSTGNDN
LHTMYLKNLFSEENLKDIVLKLNGEAEIFFRKSSIKNPIIHKKGSILVNRTYEAEEKDQFG
NIQIVRKTIPENIYQELYKYFNDKSDKELSDEAAKLKNVVGHHEAATNIVKDYRYTYDK
YFLHMPITINFKANKTSFINDRILQYIAKEKDLHVIGIDRGERNLIYVSVIDTCGNIVEQKS
FNIVNGYDYQIKLKQQEGARQIARKEWKEIGKIKEIKEGYLSLVIHEISKMVIKYNAIIAM
EDLSYGFKKGRFKVERQVYQKFETMLINKLNYLVFKDISITENGGLLKGYQLTYIPDKLK
NVGHQCGCIFYVPAAYTSKIDPTTGFVNIFKFKDLTVDAKREFIKKFDSIRYDSEKNLFCF
TEDYNNFITQNTVMSKSSWSVYTYGVRIKRRFVNGRFSNESDTIDITKDMEKTLEMTDIN
WRDGHDLRQDIIDYEIVQHIFEIFKLTVQMRNSLSELEDRDYDRLISPVLNENNIFYDSAK
AGYALPKDADANGAYCIALKGLYEIKQITENWKEDGKFSRDKLKISNKDWFDFIQNKR
YL

TABLE 4
Cas13a
Cas13a orthologs

| | | | |
|---|---|---|---|
| c2c2-5 | 1 | Lachnospiraceae | MQISKVNHKHVAVGQKDRERITGFIYNDPVGDEKSLEDVVAKRANDTKVLENVF |
| (SEQ ID | | bacterium | NTKDLYDSQESDKSEKDKEIISKGAKFVAKSENSAITILKKQNKIYSTLTSQQVIKEL |
| NO: 51) | | MA2020 | KDKEGGARIYDDDIEEALTETLKKSFRKENVRNSIKVLIENAAGIRSSLSKDEEELIQ |
| | | | EYFVKQLVEEYTKTKLQKNVVKSIKNQNMVIQPDSDSQVLSLSESRREKQSSAVSS |
| | | | DTLVNCKEKDVLKAFLTDYAVLDEDERNSLLWKLRNLVNLYFYGSESIRDYSYTK |
| | | | EKSVWKEHDEQKANKTLFIDEICHITKIGKNGKEQKVLDYEENRSRCRKQNINYYR |
| | | | SALNYAKNNTSGIFENEDSNHEWIBLIENEVERLYNGIENGEEFKFETGYISEKVWK |
| | | | AVINHLSIKYIALGKAVYNYAMKELSSPGDIEPGKIDDSYINGITSFDYEIIKAEESLQ |
| | | | RDISMNVVFATNYLACATVDTDKDFLLFSKEDIRSCTKKDGNLCKNIMQFWGGYS |
| | | | TWKNFCEEYLKDDKDALELLYSLKSMLYSMRNSSFHFSTENVDNGSWDTELIGKL |
| | | | FEEDCNRAARIEKEKFYNNNLHMFYSSSLLEKVLERLYSSHHERASQVPSFNRVFV |
| | | | RKNFPSSLSEQRITPKFTDSKDEQIWQSAVYYLCKEIYYNDFLQSKEAYKLFREGV |
| | | | KNLDKNDINNQKAADSFKQAVVYYGKAIGNATLSQVCQAIMTEYNRQNNDGLK |
| | | | KKSAYAEKQNSNKYKHYPLFLKQVLQSAFWEYLDENKEIYGFISAQIHKSNVEIKA |
| | | | EDFIANYSSQQYKKLVDKVKKTPELQKWYTLGRLINPRQANQFLGSIRNYVQFVK |
| | | | DIQRRAKENGNPIRNYYEVLESDSIIKILEMCTKLNGTTSNDIHDYFRDEDEYAEYIS |
| | | | QFVNFGDVHSGAALNAFCNSESEGKKNGIYYDGINPIVNRNWVLCKLYGSPDLISK |
| | | | IISRVNENMIHDFHKQEDLIREYQIKGICSNKKEQQDLRTFQVLKNRVELRDIVEYS |
| | | | EIINELYGQLIKWCYLRERDLMYFQLGFHYLCLNNASSKEADYIKINVDDRNISGAI |
| | | | LYQIAAMYINGLPVYYKKDDMYVALKSGKKASDELNSNEQTSKKINYFLKYGNNI |
| | | | LGDKKDQLYLAGLELFENVAEHENIIIERNEIDHEHYFYDRDRSMLDLYSEVFDRFF |
| | | | TYDMKLRKNVVNMLYNILLDHNIVSSFVFETGEKKVGRGDSEVIKPSAKIRLRAN |
| | | | NGVSSDVETYKVGSKDELKIATLPAKNEEFLLNVARLIYYPDMEAVSENMVREGV |
| | | | VKVEKSNDKKGKISRGSNTRSSNQSKYNNKSKNRMNYSMGSIFEKMDLKFD |
| c2c2-6 | 2 | Lachnospiraceae | MKISKVREENRGAKLTVNAKTAVVSENRSQEGILYNDPSRYGKSRKNDEDRDRYI |
| (SEQ ID | | bacterium | ESRLKSSGKLYRIFNEDKNKRETDELQWFLSEIVKKINRRNGLVLSDMLSVDDRAF |
| NO: 52) | | NK4A179 | EKAFEKYAELSYTNRRNKVSGSPAFETCGVDAATAERLKGIISETNFINRIKNNIDN |
| | | | KVSEDIIDRIIAKYLKKSLCRERVKRGLKKLLMNAFDLPYSDPDIDVQRDFIDYVLE |
| | | | DFYHVRAKSQVSRSIKNMNMPVQPEGDGKFAITVSKGGTESGNKRSAEKEAFKKF |
| | | | LSDYASLDERVRDDMLRRMRRLVVLYFYGSDDSKLSDVNEKFDVWEDHAARRV |
| | | | DNREFIKLPLENKLANGKTDKDAERIRKNTVKELYRNQNIGCYRQAVKAVEEDNN |
| | | | GRYFDDKMLNMFFIHRIEYGVEKIYANLKQVTEFKARTGYLSEKIWKDLINYISIK |
| | | | YIAMGKAVYNYAMDELNASDKKEIELGKISEEYLSGISSFDYELIKAEEMLQRETA |
| | | | VYVAFAARHLSSQTVELDSENSDELLLKPKGTMDKNDKNKLASNNILNELKDKET |
| | | | LRDTILQYFGGHSLWTDFPFDKYLAGGKDDVDFLTDLKDVIYSMRNDSFHYATEN |
| | | | HNNGKWNKELISAMFEHETERMTVVMKDKEYSNNLPMFYKNDDLKKLLIDLYK |
| | | | DNVERASQVPSENKVEVRKNEPALVRDKDNLGIELDLKADADKGENELKEYNAL |
| | | | YYMFKEIYYNAFLNDKNVRERFITKATKVADNYDRNKERNLKDRIKSAGSDEKK |
| | | | KLREQLQNYIAENDFGQRIKNIVQVNPDYTLAQICQLIMTEYNQQNNGCMQKKSA |
| | | | ARKDINKDSYQHYKMLLLVNLRKAFLEFIKENYAFVLKPYKHDLCDKADFVPDFA |
| | | | KYVKPYAGLISRVAGSSELQKWYIVSRFLSPAQANHMLGFLHSYKQYVWDIYRRA |
| | | | SETGTEINHSIAEDKIAGVDITDVDAVIDLSVKLCGTISSEISDYFKDDEVYAEYISSY |
| | | | LDFEYDGGNYKDSLNRFCNSDAVNDQKVALYYDGEHPKLNRNIILSKLYGERRFL |
| | | | EKITDRVSRSDIVEYYKLKKETSQYQTKGIFDSEDEQKNIKKFQEMKNIVEFRDLM |
| | | | DYSEIADELQGQLINWIYLRERDLMNFQLGYHYACLNNDSNKQATYVTLDYQGK |
| | | | KNRKINGAILYQICAMYINGLPLYYVDKDSSEWTVSDGKESTGAKIGEFYRYAKSF |
| | | | ENTSDCYASGLEIFENISEHDNITELRNYIEHFRYYSSFDRSFLGIYSEVEDREFTYDL |
| | | | KYRKNVPTILYNILLQHFVNVRFEFVSGKKMIGIDKKDRKIAKEKECARITIREKNG |
| | | | VYSEQFTYKLKNGTVYVDARDKRYLQSIIRLLFYPEKVNMDEMIEVKEKKKPSDN |
| | | | NTGKGYSKRDRQQDRKEYDKYKEGNFLSGMGGNINWDEINAQLKN |
| c2c2-7 | 3 | [Clostridium] | MKFSKVDHTRSAVGIQKATDSVHGMLYTDPKKQEVNDLDKRFDQLNVKAKRLY |
| (SEQ ID | | aminophilum | NVFNQSKAEEDDDEKRFGKVVKKLNRELKDLLFHREVSRYNSIGNAKYNYYGIKS |
| NO: 53) | | DSM 10710 | NPEEIVSNLGMVESLKGERDPQKVISKLLLYYLRKGLKPGTDGLRMILEASCGLRK |
| | | | LSGDEKELKVFLQTLDEDFEKKTFKKNLIRSIENQNMAVQPSNEGDPIIGITQGRFN |
| | | | SQKNEEKSAIERMIVISMYADLNEDHREDVLRKLRRLNVLYFNVDTEKTEEPTLPGE |
| | | | VDTNPVFEVWHDHEKGKENDRQFATFAKILTEDRETRKKEKLAVKEALNDLKSAI |
| | | | RDHNIMAYRCSIKVTEQDKDGLFFEDQRINREWIHHIESAVERILASINPEKLYKLRI |
| | | | GYLGEKVWKDLLNYLSIKYIAVGKAVEHFAMEDLGKTGQDIELGKLSNSVSGGLT |
| | | | SFDYEQIRADETLQRQLSVEVAFAANNLFRAVVGQTGKKIEQSKSEENEEDFLLW |
| | | | KAEKIAESIKKEGEGNTLKSILQFFGGASSWDLNHFCAAYGNESSALGYETKFADD |
| | | | LRKAIYSLRNETFHETTLNKGSFDWNAKLIGDMFSHEAATGIAVERTRFYSNNLPM |
| | | | EYRESDLKRIMDHLYNTYHPRASQVPSENTSVEVRKNERLFLSNTLNTNTSFDTEVY |
| | | | QKWESGVYYLFKEIYYNSFLPSGDAHHLFFEGLRRIRKEADNLPIVGKEAKKRNAV |
| | | | QDFGRRCDELKNLSLSAICQMIMTEYNEQNNGNRKVKSTREDKRKPDIFQHYKML |
| | | | LLRTLQEAFAIYIRREEFKFIFDLPKTLYVMKPVEEFLPNWKSGMFDSLVERVKQSP |
| | | | DLQRWYVLCKFLNGRLLNQLSGVIRSYIQFAGDIQRRAKANHNRLYMDNTQRVE |
| | | | YYSNVLEVVDFCIKGTSRFSNVFSDYFRDEDAYADYLDNYLQFKDEKIAEVSSFAA |
| | | | LKTFCNEEEVKAGIYMDGENPVMQRNIVMAKLFGPDEVLKNVVPKVTREEIEEYY |
| | | | QLEKQIAPYRQNGYCKSEEDQKKLLREQRIKNRVEFQTITEFSEIINELLGQLISWSF |
| | | | LRERDLLYFQLGFHYLCLHNDTEKPAEYKEISREDGTVIRNAILHQVAAMYVGGLP |
| | | | VYTLADKKLAAFEKGEADCKLSISKDTAGAGKKIKDFFRYSKYVIIKDRMLTDQN |
| | | | QKYTIYLAGLELFENTDEHDNITDVRKYVDHFKYYATSDENAMSILDLYSEIHDRF |
| | | | FTYDMKYQKNVANMLENILLRHEVLIRPEFFTGSKKVGEGKKITCKARAQIEIAEN |
| | | | GMRSEDFTYKLSDGKKNISTCMIAARDQKYLNTVARLLYYPHEAKKSIVDTREKK |
| | | | NNKKTNRGDGTENKQKGTARKEKDNGPREENDTGFSNTPFAGFDPFRNS |
| c2c2-8 | 5 | Camobacterium | MRITKVKIKLDNKLYQVTMQKEEKYGTLKLNEESRKSTAEILRLKKASFNKSFHSK |
| (SEQ ID | | gallinarum | TINSQKENKNATIKKNGDYISQIFEKLVGVDTNKNIRKPKMSLTDLKDLPKKDLAL |
| NO: 54) | | DSM 4847 | FIKRKEKNDDIVEIKNLDLISLEYNALQKVPGEHETDESWADFCQEMMPYREYKNK |
| | | | FIERKIILLANSIEQNKGFSINPETFSKRKRVLHQWAIEVQERGDFSILDEKLSKLAEI |
| | | | YNFKKMCKRVQDELNDLEKSMKKGKNPEKEKEAYKKQKNFKIKTIWKDYPYKT |
| | | | HIGLIEKIKENEELNQFNIEIGKYFEHYFPIKKERCTEDEPYYLNSETIATTVNYQLK |
| | | | NALISYLMQIGKYKQFGLENQVLDSKKLQEIGIYEGFQTKFMDACVFATSSLKNIIE |
| | | | PMRSGDILGKREFKEAIATSSEVNYHHFFPYFPFELKGMKDRESELIPFGEQTEAKQ |
| | | | MQNIWALRGSVQQIRNEIFHSFDKNQKFNLPQLDKSNFEFDASENSTGKSQSYIET |
| | | | DYKELFEAEKNQLEQFFIERIKSSGALEYYPLKSLEKLFAKKEMKESLGSQVVAFAP |
| | | | SYKKLVKKGHSYQTATEGTANYLGLSYYNRYELKEESFQAQYYLLKLIYQYVFLP |
| | | | NESQGNSPAFRETVKAILRINKDEARKKMKKNKKFLRKYAFEQVREMEEKETPDQ |
| | | | YMSYLQSEMREEKVRKAEKNDKGFEKNITMNFEKLLMQIFVKGEDVFLTTFAGKE |
| | | | LLLSSEEKVIKETEISLSKKINEREKTLKASIQVEHQLVATNSAISYWLFCKLLDSRH |
| | | | LNELRNEMIKFKQSRIKENHTQHAELIQNLLPIVELTILSNDYDEKNDSQNVDVSAY |
| | | | FEDKSLYETAPYVQTDDRTRVSFRPILKLEKYHTKSLIEALLKDNPQFRVAATDIQE |
| | | | WMHKREEIGELVEKRKNLHTEWAEGQQTLGAEKREEYRDYCKKIDRENWKANK |
| | | | VTLTYLSQLHYLITDLLGRMVGFSALFERDLVYFSRSFSELGGETYHISDYKNLSGV |
| | | | LRLNAEVKPIKIKNIKVIDNEENPYKGNEPEVKPFLDRLHAYLENVIGIKAVHGKIR |
| | | | NQTAHLSVLQLELSMIESMNNLRDLMAYDRKLKNAVTKSMIKILDKHGMILKLKI |
| | | | DENHKNFEIESLIPKEIIHLKDKAIKTNQVSEEYCQLVLALLTTNPGNQLN |
| c2c2-9 | 6 | Camobacterium | MRMTKVKINGSPVSMNRSKLNGHLVWNGTTNTVNILTKKEQSFAASFLNKTLVK |
| (SEQ ID | | gallinarum | ADQVKGYKVLAENIFIIFEQLEKSNSEKPSVYLNNIRRLKEAGLKRFFKSKYHEEIK |
| NO: 55) | | DSM 4847 | YTSEKNQSVPTKLNLIPLFFNAVDRIQEDKFDEKNWSYFCKEMSPYLDYKKSYLNR |
| | | | KKEILANSIQQNRGFSMPTAEEPNLLSKRKQLFQQWAMKFQESPLIQQNNFAVEQF |
| | | | NKEFANKINELAAVYNVDELCTAITEKLMNFDKDKSNKTRNFEIKKLWKQHPHNK |
| | | | DKALIKLFNQEGNEALNQFNIELGKYFEHYFPKTGKKESAESYYLNPQTIIKTVGY |
| | | | QLRNAFVQYLLQVGKLHQYNKGVLDSQTLQEIGMYEGFQTKFMDACVFASSSLR |
| | | | NIIQATTNEDILTREKFKKELEKNVELKHDLEFKTEIVEERDENPAKKIAMTPNELD |
| | | | LWAIRGAVQRVRNQIFHQQINKRHEPNQLKVGSFENGDLGNVSYQKTIYQKLFDA |
| | | | EIKDIEIYFAEKIKSSGALEQYSMKDLEKLFSNKELTLSLGGQVVAFAPSYKKLYKQ |
| | | | GYFYQNEKTIELEQFTDYDFSNDVFKANYYLIKLIYHYVFLPQFSQANNKLFKDTV |
| | | | HYVIQQNKELNTTEKDKKNNKKIRKYAFEQVKLMKNESPEKYMQYLQREMQEER |
| | | | TIKEAKKTNEEKPNYNFEKLLIQIFIKGFDTFLRNFDLNLNPAEELVGTVKEKAEGL |
| | | | RKRKERIAKILNVDEQIKTGDEEIAFWIFAKLLDARHLSELRNEMIKFKQSSVKKGL |
| | | | IKNGDLIEQMQPILELCILSNDSESMEKESEDKIEVFLEKVELAKNEPYMQEDKLTP |
| | | | VKFRFMKQLEKYQTRNFIENLVIENPEEKVSEKIVLNWHEEKEKIADLVDKRTKLH |
| | | | EEWASKAREIEEYNEKIKKNKSKKLDKPAEFAKFAEYKIICEAIENENRLDHKVRLT |
| | | | YLKNLHYLMIDLMGRMVGFSVLFERDFVYMGRSYSALKKQSIYLNDYDTFANIRD |
| | | | WEVNENKHLFGTSSSDLTFQETAEFKNLKKPMENQLKALLGVTNHSFEIRNNIAHL |
| | | | HVLRNDGKGEGVSLLSCMNDLRKLMSYDRKLKNAVTKAIIKILDKHGMILKLTNN |
| | | | DHTKPFEIESLKPKKIIHLEKSNHSFPMDQVSQEYCDLVKKMLVFTN |
| c2c2-10 | 7 | Paludibacter | MRVSKVKVKDGGKDKMVLVHRKTTGAQLVYSGQPVSNETSNILPEKKRQSFDLS |
| (SEQ ID | | propionicigenes | TLNKTIIKEDTAKKQKLNVDQYKIVEKIFKYPKQELPKQIKAEEILPFLNHKFQEPV |
| NO: 56) | | WB4 | KYWKNGKEESFNLTLLIVEAVQAQDKRKLQPYYDWKTWYIQTKSDLLKKSIENN |
| | | | RIDLTENLSKRKKALLAWETEFTASGSIDLTHYHKVYMTDVLCKMLQDVKPLTDD |
| | | | KGKINTNAYHRGLKKALQNHQPAIFGTREVPNEANRADNQLSIYHLEVVKYLEHY |
| | | | FPIKTSKRRNTADDIAHYLKAQTLKTTIEKQLVNAIRANIIQQGKTNHHELKADTTS |
| | | | NDLIRIKTNEAFVLNLTGTCAFAANNIRNMVDNEQTNDILGKGDFIKSLLKDNTNS |
| | | | QLYSEFFGEGLSTNKAEKETQLWGIRGAVQQIRNNVNHYKKDALKTVFNISNFENP |
| | | | TITDPKQQTNYADTIYKARFINELEKIPEAFAQQLKTGGAVSYYTIENLKSLLTTFQF |
| | | | SLCRSTIPFAPGEKKVENGGINYQNAKQDESFYELMLEQYLRKENFAEESYNARYF |
| | | | MLKLIYNNLFLPGETTDRKAFADSVGFVQMQNKKQAEKVNPRKKEAYAFEAVRP |
| | | | MTAADSIADYMAYVQSELMQEQNKKEEKVAEETRINFEKEVLQVFIKGEDSFLRA |
| | | | KEFDEVQMPQPQLTATASNQQKADKLNQLEASITADCKLTPQYAKADDATHIAFY |
| | | | VFCKLLDAAHLSNLRNELIKFRESVNEFKEHHLLEIIEICLLSADVVPTDYRDLYSSE |
| | | | ADCLARLRPFIEQGADITNWSDLFVQSDKHSPVIHANIELSVKYGTTKLLEQIINKD |
| | | | TQFKTTEANFTAWNTAQKSIEQLIKQREDHHEQWVKAKNADDKEKQERKREKSN |
| | | | FAQKFIEKHGDDYLDICDYINTYNWLDNKMEIFVHLNRLHGLTIELLGRMAGEVAL |
| | | | FDRDFQFFDEQQIADEFKLHGEVNLHSIDKKLNEVPTKKIKEIYDIRNKIIQINGNKI |
| | | | NESVRANLIQFISSKRNYYNNAFLHVSNDEIKEKQMYDIRNHIAHENYLTKDAADF |
| | | | SLIDLINELRELLHYDRKLKNAVSKAFIDLEDKHGMILKLKLNADHKLKVESLEPK |
| | | | KIYHLGSSAKDKPEYQYCTNQVMMAYCNMCRSLLEMKK |
| c2c2-11 | 9 | Listeria | MLALLHQEVPSQKLHNLKSLNTESLTKLFKPKFQNMISYPPSKGAEHVQFCLTDIA |
| (SEQ ID | | weihenstephan- | VPAIRDLDEIKPDWGIFFEKLKPYTDWAESYIHYKQTTIQKSIEQNKIQSPDSPRKLV |
| NO: 57) | | ensis FSL R9- | LQKYVTAFLNGEPLGLDLVAKKYKLADLAESEKVVDLNEDKSANYKIKACLQQH |
| | | 0317 | QRNILDELKEDPELNQYGIEVKKYIQRYFPIKRAPNRSKHARADFLKKELIESTVEQ |
| | | | QFKNAVYHYVLEQGKMEAYELTDPKTKDLQDIRSGEAFSFKFINACAFASNNLKM |
| | | | ILNPECEKDILGKGDFKKNLPNSTTQSDVVKKMIPFFSDEIQNVNEDEAIWAIRGSIQ |
| | | | QIRNEVYHCKKHSWKSILKIKGFEFEPNNMKYTDSDMQKLMDKDIAKIPDFIEEKL |
| | | | KSSGIIRFYSHDKLQSIWEMKQGFSLLTTNAPFVPSFKRVYAKGHDYQTSKNRYYD |
| | | | LGLTTEDILEYGEEDFRARYFLTKLVYYQQEMPWFTADNNAFRDAANFVLRLNKN |
| | | | RQQDAKAFINIREVEEGEMPRDYMGYVQGQIAIHEDSTEDTPNHFEKFISQVFIKGF |
| | | | DSHMRSADLKFIKNPRNQGLEQSEIEEMSFDIKVEPSFLKNKDDYIAFWTFCKMLD |
| | | | ARHLSELRNEMIKYDGHLTGEQEIIGLALLGVDSRENDWKQFFSSEREYEKIMKGY |
| | | | VGEELYQREPYRQSDGKTPILFRGVEQARKYGTETVIQRLFDASPEFKVSKCNITE |
| | | | WERQKETIEETIERRKELHNEWEKNPKKPQNNAFFKEYKECCDAIDAYNWHKNK |
| | | | TTLVYVNELHHLLIEILGRYVGYVAIADRDFQCMANQYFKHSGITERVEYWGDNR |
| | | | LKSIKKLDTELKKEGLEVSEKNARNHIAHLNYLSLKSECTLLYLSERLREIFKYDRK |
| | | | LKNAVSKSLIDILDRHGMSVVFANLKENKHRLVIKSLEPKKLRHLGEKKIDNGYIE |
| | | | TNQVSEEYCGIVKRLLEI |
| c2c2-12 | 10 | Listeriaceae | MKITKMRVDGRTIVMERTSKEGQLGYEGIDGNKTTEIIFDKKKESFYKSILNKTVR |
| (SEQ ID | | bacterium FSL | KPDEKEKNRRKQAINKAINKEITELMLAVLHQEVPSQKLHNLKSLNTESLTKLFKP |
| NO: 58) | | M6-0635 = | KFQNMISYPPSKGAEHVQFCLTDIAVPAIRDLDEIKPDWGIFFEKLKPYTDWAESYI |
| | | Listeria | HYKQTTIQKSIEQNKIQSPDSPRKLVLQKYVTAFLNGEPLGLDLVAKKYKLADLAE |
| | | newyorkensis | SFKLVDLNEDKSANYKIKACLQQHQRNILDELKEDPELNQYGIEVKKYIQRYFPIK |
| | | FSL M6-0635 | RAPNRSKHARADFLKKELIESTVEQQFKNAVYHYVLEQGKMEAYELTDPKTKDL |
| | | | QDIRSGEAFSFKFINACAFASNNLKMILNPECEKDILGKGNFKKNLPNSTTRSDVVK |
| | | | KMIPFFSDELQNVNEDEAIWAIRGSIQQIRNEVYHCKKHSWKSILKIKGFEFEPNNM |
| | | | KYADSDMQKLMDKDIAKIPEFIEEKLKSSGVVRFYRHDELQSIWEMKQGFSLLTTN |
| | | | APFVPSFKRVYAKGHDYQTSKNRYYNLDLTTFDILEYGEEDFRARYFLTKLVYYQ |
| | | | QEMPWFTADNNAFRDAANFVLRLNKNRQQDAKAFINIREVEEGEMPRDYMGYV |
| | | | QGQIAIHEDSIEDTPNHFEKFISQVFIKGFDRHMRSANLKFIKNPRNQGLEQSEIEEM |
| | | | SFDIKVEPSELKNKDDYIAFWIECKMLDARHLSELRNEMIKYDGHLTGEQEIIGLAL |
| | | | LGVDSRENDWKQFFSSEREYEKIMKGYVVEELYQREPYRQSDGKTPILFRGVEQA |
| | | | RKYGTETVIQRLFDANPEEKVSKCNLAEWERQKETIEETIKRRKELHNEWAKNPK |
| | | | KPQNNAFFKEYKECCDAIDAYNWHKNKTTLAYVNELHHLLIEILGRYVGYVAIAD |
| | | | RDFQCMANQYFKHSGITERVEYWGDNRLKSIKKLDTFLKKEGLEVSEKNARNHIA |
| | | | HLNYLSLKSECTLLYLSERLREIFKYDRKLKNAVSKSLIDILDRHGMSVVFANLKE |
| | | | NKHRLVIKSLEPKKLRHLGGKKIDGGYIETNQVSEEYCGIVKRLLEM |
| c2c2-13 | 12 | Leptotrichia | MKVTKVDGISHKKYIEEGKLVKSTSEENRTSERLSELLSIRLDIYIKNPDNASEEENR |
| (SEQ ID | | wadei F0279 | IRRENLKKFFSNKVLHLKDSVLYLKNRKEKNAVQDKNYSEEDISEYDLKNKNSFS |
| NO: 59) | | | VLKKILLNEDVNSEELEIFRKDVEAKLNKINSLKYSFEENKANYQKINENNVEKVG |
| | | | GKSKRNITYDYYRESAKRNDYINNVQEAFDKLYKKEDIEKLEFLIENSKKHEKYKIR |
| | | | EYYHKIIGRKNDKENFAKIIYEEIQNVNNIKELIEKIPDMSELKKSQVFYKYYLDKE |
| | | | ELNDKNIKYAFCHFVEIEMSQLLKNYVYKRLSNISNDKIKRIFEYQNLKKLIENKLL |
| | | | NKLDTYVRNCGKYNYYLQVGEIATSDFIARNRQNEAFLRNIIGVSSVAYFSLRNILE |
| | | | TENENDITGRMRGKTVKNNKGEEKYVSGEVDKIYNENKQNEVKENLKMFYSYDF |
| | | | NMDNKNEIEDFFANIDEATSSIRHGIVHFNLELEGKDIFAFKNIAPSEISKKMFQNEIN |
| | | | EKKLKLKIFKQLNSANVENYYEKDVIIKYLKNTKENEVNKNIPFVPSFTKLYNKIED |
| | | | LRNTLKFEWSVPKDKEEKDAQIYLLKNIYYGEFLNKFVKNSKVFFKITNEVIKINKQ |
| | | | RNQKTGHYKYQKFENIEKTVPVEYLAIIQSREMINNQDKEEKNTYIDFIQQIFLKGFI |
| | | | DYLNKNNLKYIESNNNNDNNDIFSKIKIKKDNKEKYDKILKNYEKHNRNKEIPHEI |
| | | | NEFVREIKLGKILKYTENLNMFYLILKLLNHKELTNLKGSLEKYQSANKEETFSDEL |
| | | | ELINLLNLDNNRVTEDFELEANEIGKELDFNENKIKDRKELKKEDTNKIYEDGENII |
| | | | KHRAFYNIKKYGMLNLLEKIADKAKYKISLKELKEYSNKKNEIEKNYTMQQNLHR |
| | | | KYARPKKDEKENDEDYKEYEKAIGNIQKYTHLKNKVEFNELNLLQGLLLKILHRL |
| | | | VGYTSIWERDLRFRLKGEFPENHYIEEIFNEDNSKNVKYKSGQIVEKYINFYKELYK |
| | | | DNVEKRSIYSDKKVKKLKQEKKDLYIRNYIAHENYIPHAEISLLEVLENLRKLLSYD |
| | | | RKLKNAIMKSIVDILKEYGEVATFKIGADKKIEIQTLESEKIVHLKNLKKKKLMTDR |
| | | | NSEELCELVKVMFEYKALE |
| c2c2-14 | 15 | Rhodobacter | MQIGKVQGRTISEFGDPAGGLKRKISTDGKNRKELPAHLSSDPKALIGQWISGIDKI |
| (SEQ ID | | capsulatus SB | YRKPDSRKSDGKAIHSPTPSKMQFDARDDLGEAFWKLVSEAGLAQDSDYDQFKR |
| NO: 60) | | 1003 | RLHPYGDKFQPADSGAKLKFEADPPEPQAFHGRWYGAMSKRGNDAKELAAALYE |
| | | | HLHVDEKRIDGQPKRNPKTDKFAPGLVVARALGIESSVLPRGMARLARNWGEEEI |
| | | | QTYFVVDVAASVKEVAKAAVSAAQAFDPPRQVSGRSLSPKVGFALAEHLERVTGS |
| | | | KRCSFDPAAGPSVLALHDEVKKTYKRLCARGKNAARAFPADKTELLALMRHTHE |
| | | | NRVRNQMVRMGRVSEYRGQQAGDLAQSHYWTSAGQTEIKESEIFVRLWVGAFAL |
| | | | AGRSMKAWIDPMGKIVNTEKNDRDLTAAVNIRQVISNKEMVAEAMARRGIYFGE |
| | | | TPELDRLGAEGNEGFVFALLRYLRGCRNQTFHLGARAGELKEIRKELEKTRWGKA |
| | | | KEAEHVVLTDKTVAAIRAIIDNDAKALGARLLADLSGAFVAHYASKEHESTLYSEI |
| | | | VKAVKDAPEVSSGLPRLKLLLKRADGVRGYVHGLRDTRKHAFATKLPPPPAPREL |
| | | | DDPATKARYIALLRLYDGPFRAYASGITGTALAGPAARAKEAATALAQSVNVTKA |
| | | | YSDVMEGRTSRLRPPNDGETLREYLSALTGETATEFRVQIGYESDSENARKQAEFI |
| | | | ENYRRDMLAFMFEDYIRAKGEDWILKIEPGATAMTRAPVLPEPIDTRGQYEHWQA |
| | | | ALYLVMHFVPASDVSNLLHQLRKWEALQGKYELVQDGDATDQADARREALDLV |
| | | | KRERDVLVLELKTGEARFEGRAAPFDLKPFRALFANPATEDRLFMATPTTARPAED |
| | | | DPEGDGASEPELRVARTLRGLRQIARYNHMAVLSDLFAKHKVRDEEVARLAEIED |
| | | | ETQEKSQIVAAQELRTDLHDKVMKCHPKTISPEERQSYAAAIKTIEEHRFLVGRVY |
| | | | LGDHLRLHRLMMDVIGRLIDYAGAYERDTGTFLINASKQLGAGADWAVTIAGAA |
| | | | NTDARTQTRKDLAHENVLDRADGTPDLTALVNRAREMMAYDRKRKNAVPRSILD |
| | | | MLARLGLTLKWQMKDHLLQDATITQAAIKHLDKVRLTVGGPAAVTEARFSQDYL |
| | | | QMVAAVFNGSVQNPKPRRRDDGDAWHKPPKPATAQSQPDQKPPNKAPSAGSRLP |
| | | | PPQVGEVYEGVVVKVIDTGSLGFLAVEGVAGNIGLHISRLRRIREDAIIVGRRYRFR |
| | | | VEIYVPPKSNTSKLNAADLVRID |
| c2c2-15 | 16 | Rhodobacter | MQIGKVQGRTISEFGDPAGGLKRKISTDGKNRKELPAHLSSDPKALIGQWISGIDKI |
| (SEQ ID | | capsulatus | YRKPDSRKSDGKAIHSPTPSKMQFDARDDLGEAFWKLVSEAGLAQDSDYDQFKR |
| NO: 61) | | R121 | RLHPYGDKFQPADSGAKLKFEADPPEPQAFHGRWYGAMSKRGNDAKELAAALYE |
| | | | HLHVDEKRIDGQPKRNPKTDKFAPGLVVARALGIESSVLPRGMARLARNWGEEEI |
| | | | QTYFVVDVAASVKEVAKAAVSAAQAFDPPRQVSGRSLSPKVGFALAEHLERVTGS |
| | | | KRCSFDPAAGPSVLALHDEVKKTYKRLCARGKNAARAFPADKTELLALMRHTHE |
| | | | NRVRNQMVRMGRVSEYRGQQAGDLAQSHYWTSAGQTEIKESEIFVRLWVGAFAL |
| | | | AGRSMKAWIDPMGKIVNTEKNDRDLTAAVNIRQVISNKEMVAEAMARRGIVEGE |
| | | | TPELDRLGAEGNEGFVFALLRYLRGCRNQTFHLGARAGELKEIRKELEKTRWGKA |
| | | | KEAEHVVLTDKTVAAIRAIIDNDAKALGARLLADLSGAFVAHYASKEHFSTLYSEI |
| | | | VKAVKDAPEVSSGLPRLKLLLKRADGVRGYVHGLRDTRKHAFATKLPPPPAPREL |
| | | | DDPATKARYIALLRLYDGPFRAYASGITGTALAGPAARAKEAATALAQSVNVTKA |
| | | | YSDVMEGRSSRLRPPNDGETLREYLSALTGETATEFRVQIGYESDSENARKQAEFIE |
| | | | NYRRDMLAFMFEDYIRAKGEDWILKIEPGATAMTRAPVLPEPIDTRGQYEHWQAA |
| | | | LYLVMHFVPASDVSNLLHQLRKWEALQGKYELVQDGDATDQADARREALDLVK |
| | | | RFRDVLVLFLKTGEARFEGRAAPFDLKPFRALFANPATFDRLFMATPTTARPAEDD |
| | | | PEGDGASEPELRVARTLRGLRQIARYNHMAVLSDLFAKHKVRDEEVARLAEIEDE |
| | | | TQEKSQIVAAQELRTDLHDKVMKCHPKTISPEERQSYAAAIKTIEEHRFLVGRVYL |
| | | | GDHLRLHRLMMDVIGRLIDYAGAYERDTGTFLINASKQLGAGADWAVTIAGAAN |
| | | | TDARTQTRKDLAHENVLDRADGTPDLTALVNRAREMMAYDRKRKNAVPRSILD |
| | | | MLARLGLTLKWQMKDHLLQDATITQAAIKHLDKVRLTVGGPAAVTEARFSQDYL |
| | | | QMVAAVFNGSVQNPKPRRRDDGDAWHKPPKPATAQSQPDQKPPNKAPSAGSRLP |
| | | | PPQVGEVYEGVVVKVIDTGSLGFLAVEGVAGNIGLHISRLRRIREDAIIVGRRYRFR |
| | | | VEIYVPPKSNTSKLNAADLVRID |
| c2c2-16 | 17 | Rhodobacter | MQIGKVQGRTISEFGDPAGGLKRKISTDGKNRKELPAHLSSDPKALIGQWISGIDKI |
| (SEQ ID | | capsulatus | YRKPDSRKSDGKAIHSPTPSKMQFDARDDLGEAFWKLVSEAGLAQDSDYDQFKR |
| NO: 62) | | DE442 | RLHPYGDKFQPADSGAKLKFEADPPEPQAFHGRWYGAMSKRGNDAKELAAALYE |
| | | | HLHVDEKRIDGQPKRNPKTDKFAPGLVVARALGIESSVLPRGMARLARNWGEEEI |
| | | | QTYFVVDVAASVKEVAKAAVSAAQAFDPPRQVSGRSLSPKVGFALAEHLERVTGS |
| | | | KRCSFDPAAGPSVLALHDEVKKTYKRLCARGKNAARAFPADKTELLALMRHTHE |
| | | | NRVRNQMVRMGRVSEYRGQQAGDLAQSHYWTSAGQTEIKESEIFVRLWVGAFAL |
| | | | AGRSMKAWIDPMGKIVNTEKNDRDLTAAVNIRQVISNKEMVAEAMARRGIVEGE |
| | | | TPELDRLGAEGNEGFVFALLRYLRGCRNQTFHLGARAGELKEIRKELEKTRWGKA |
| | | | KEAEHVVLTDKTVAAIRAIIDNDAKALGARLLADLSGAFVAHYASKEHFSTLYSEI |
| | | | VKAVKDAPEVSSGLPRLKLLLKRADGVRGYVHGLRDTRKHAFATKLPPPPAPREL |
| | | | DDPATKARYIALLRLYDGPFRAYASGITGTALAGPAARAKEAATALAQSVNVTKA |
| | | | YSDVMEGRSSRLRPPNDGETLREYLSALTGETATEFRVQIGYESDSENARKQAEFIE |
| | | | NYRRDMLAFMFEDYIRAKGEDWILKIEPGATAMTRAPVLPEPIDTRGQYEHWQAA |
| | | | LYLVMHFVPASDVSNLLHQLRKWEALQGKYELVQDGDATDQADARREALDLVK |
| | | | RFRDVLVLFLKTGEARFEGRAAPFDLKPFRALFANPATFDRLFMATPTTARPAEDD |
| | | | PEGDGASEPELRVARTLRGLRQIARYNHMAVLSDLFAKHKVRDEEVARLAEIEDE |
| | | | TQEKSQIVAAQELRTDLHDKVMKCHPKTISPEERQSYAAAIKTIEEHRFLVGRVYL |
| | | | GDHLRLHRLMMDVIGRLIDYAGAYERDTGTFLINASKQLGAGADWAVTIAGAAN |
| | | | TDARTQTRKDLAHENVLDRADGTPDLTALVNRAREMMAYDRKRKNAVPRSILD |
| | | | MLARLGLTLKWQMKDHLLQDATITQAAIKHLDKVRLTVGGPAAVTEARFSQDYL |
| | | | QMVAAVFNGSVQNPKPRRRDDGDAWHKPPKPATAQSQPDQKPPNKAPSAGSRLP |
| | | | PPQVGEVYEGVVVKVIDTGSLGFLAVEGVAGNIGLHISRLRRIREDAIIVGRRYRFR |
| | | | VEIYVPPKSNTSKLNAADLVRID |
| c2c2-2 | | | MGNLFGHKRWYEVRDKKDFKIKRKVKVKRNYDGNKYILNINENNNKEKIDNNKF |
| (SEQ ID | | | IRKYINYKKNDNILKEFTRKFHAGNILFKLKGKEGIIRIENNDDFLETEEVVLYIEAY |
| NO: 63) | | | GKSEKLKALGITKKKIIDEAIRQGITKDDKKIEIKRQENEEEIEIDIRDEYTNKTLNDC |
| | | | SIILRIIENDELETKKSIYEIFKNINMSLYKIIEKIIENETEKVFENRYYEEHLREKLLK |
| | | | DDKIDVILTNEMEIREKIKSNLEILGFVKFYLNVGGDKKKSKNKKMLVEKILNINVD |
| | | | LTVEDIADFVIKELEFWNITKRIEKVKKVNNEFLEKRRNRTYIKSYVLLDKHEKFKI |
| | | | ERENKKDKIVKFFVENIKNNSIKEKIEKILAEFKIDELIKKLEKELKKGNCDTEIFGIF |
| | | | KKHYKVNFDSKKFSKKSDEEKELYKIIYRYLKGRIEKILVNEQKVRLKKMEKIEIEK |
| | | | ILNESILSEKILKRVKQYTLEHIMYLGKLRHNDIDMTTVNTDDFSRLHAKEELDLEL |
| | | | ITFFASTNMELNKIFSRENINNDENIDFFGGDREKNYVLDKKILNSKIKIIRDLDFIDN |
| | | | KNNITNNFIRKFTKIGTNERNRILHAISKERDLQGTQDDYNKVINIIQNLKISDEEVS |
| | | | KALNLDVVFKDKKNIITKINDIKISEENNNDIKYLPSFSKVLPEILNLYRNNPKNEPF |
| | | | DTIETEKIVLNALIYVNKELYKKLILEDDLEENESKNIFLQELKKTLGNIDEIDENIIE |
| | | | NYYKNAQISASKGNNKAIKKYQKKVIECYIGYLRKNYEELFDFSDFKMNIQEIKKQ |
| | | | IKDINDNKTYERITVKTSDKTIVINDDFEYIISIFALLNSNAVINKIRNRFFATSVWLN |
| | | | TSEYQNIIDILDEIMQLNTLRNECITENWNLNLEEFIQKMKEIEKDFDDFKIQTKKEI |
| | | | FNNYYEDIKNNILTEFKDDINGCDVLEKKLEKIVIFDDETKFEIDKKSNILQDEQRKL |
| | | | SNINKKDLKKKVDQYIKDKDQEIKSKILCRIIFNSDFLKKYKKEIDNLIEDMESENE |
| | | | NKFQEIYYPKERKNELYIYKKNLFLNIGNPNFDKIYGLISNDIKMADAKFLFNIDGK |
| | | | NIRKNKISEIDAILKNLNDKLNGYSKEYKEKYIKKLKENDDFFAKNIQNKNYKSFE |
| | | | KDYNRVSEYKKIRDLVEFNYLNKIESYLIDINWKLAIQMARFERDMHYIVNGLREL |
| | | | GIIKLSGYNTGISRAYPKRNGSDGFYTTTAYYKFFDEESYKKFEKICYGFGIDLSENS |
| | | | EINKPENESIRNYISHFYIVRNPFADYSIAEQIDRVSNLLSYSTRYNNSTYASVFEVF |
| | | | KKDVNLDYDELKKKFKLIGNNDILERLMKPKKVSVLELESYNSDYIKNLIIELLTKI |
| | | | ENTNDTL |
| c2c2-3 | | L wadei (Lw2) | MKVTKVDGISHKKYIEEGKLVKSTSEENRTSERLSELLSIRLDIYIKNPDNASEEENR |
| (SEQ ID | | | IRRENLKKFFSNKVLHLKDSVLYLKNRKEKNAVQDKNYSEEDISEYDLKNKNSFS |
| NO: 64) | | | VLKKILLNEDVNSEELEIFRKDVEAKLNKINSLKYSFEENKANYQKINENNVEKVG |
| | | | GKSKRNITYDYYRESAKRNDYINNVQEAFDKLYKKEDIEKLFFLIENSKKHEKYKIR |
| | | | EYYHKIIGRKNDKENFAKIIYEEIQNVNNIKELIEKIPDMSELKKSQVFYKYYLDKE |
| | | | ELNDKNIKYAFCHFVEIEMSQLLKNYVYKRLSNISNDKIKRIFEYQNLKKLIENKLL |
| | | | NKLDTYVRNCGKYNYYLQVGEIATSDFIARNRQNEAFLRNIIGVSSVAYFSLRNILE |
| | | | TENENDITGRMRGKTVKNNKGEEKYVSGEVDKIYNENKQNEVKENLKMFYSYDF |
| | | | NMDNKNEIEDFFANIDEATSSIRHGIVHFNLELEGKDIFAFKNIAPSEISKKMFQNEIN |
| | | | EKKLKLKIFKQLNSANVFNYYEKDVIIKYLKNTKFNFVNKNIPFVPSFTKLYNKIED |
| | | | LRNTLKFFWSVPKDKEEKDAQIYLLKNIYYGEFLNKFVKNSKVFFKITNEVIKINKQ |
| | | | RNQKTGHYKYQKFENIEKTVPVEYLAIIQSREMINNQDKEEKNTYIDFIQQIFLKGFI |
| | | | DYLNKNNLKYIESNNNNDNNDIFSKIKIKKDNKEKYDKILKNYEKHNRNKEIPHEI |
| | | | NEFVREIKLGKILKYTENLNMFYLILKLLNHKELTNLKGSLEKYQSANKEETFSDEL |
| | | | ELINLLNLDNNRVTEDFELEANEIGKFLDFNENKIKDRKELKKFDTNKIYFDGENII |
| | | | KHRAFYNIKKYGMLNLLEKIADKAKYKISLKELKEYSNKKNEIEKNYTMQQNLHR |
| | | | KYARPKKDEKFNDEDYKEYEKAIGNIQKYTHLKNKVEFNELNLLQGLLLKILHRL |
| | | | VGYTSIWERDLRFRLKGEFPENHYIEEIFNEDNSKNVKYKSGQIVEKYINFYKELYK |
| | | | DNVEKRSIYSDKKVKKLKQEKKDLYIRNYIAHFNYIPHAEISLLEVLENLRKLLSYD |
| | | | RKLKNAIMKSIVDILKEYGFVATFKIGADKKIEIQTLESEKIVHLKNLKKKKLMTDR |
| | | | NSEELCELVKVMFEYKALEKRPAATKKAGQAKKKKGSYPYDVPDYAYPYDVPD |
| | | | YAYPYDVPDYA* |
| c2c2-4 | | Listeria | MWISIKTLIHHLGVLFFCDYMYNRREKKIIEVKTMRITKVEVDRKKVLISRDKNGG |
| (SEQ ID | | seeligeri | KLVYENEMQDNTEQIMHHKKSSFYKSVVNKTICRPEQKQMKKLVHGLLQENSQE |
| NO: 65) | | | KIKVSDVTKLNISNELNHRFKKSLYYFTENSPDKSEEYRIEINLSQLLEDSLKKQQGT |
| | | | FTCWESFSKDMELYINWAENYISSKTKLIKKSIRNNRIQSTESRSGQLMDRYMKDIL |
| | | | NKNKPFDIQSVSEKYQLEKLTSALKATFKEAKKNDKEINYKLKSTLQNHERQIIEEL |
| | | | KENSELNQFNIEIRKHLETYFPIKKTNRKVGDIRNLEIGEIQKIVNHRLKNKIVQRIL |
| | | | QEGKLASYEIESTVNSNSLQKIKIEEAFALKFINACLFASNNLRNMVYPVCKKDILM |
| | | | IGEFKNSFKEIKHKKFIRQWSQFFSQEITVDDIELASWGLRGAIAPIRNEIIHLKKHS |
| | | | WKKFFNNPTFKVKKSKIINGKTKDVTSEFLYKETLFKDYFYSELDSVPELIINKMES |
| | | | SKILDYYSSDQLNQVFTIPNFELSLLTSAVPFAPSFKRVYLKGFDYQNQDEAQPDY |
| | | | NLKLNIYNEKAFNSEAFQAQYSLFKMVYYQVFLPQFTTNNDLFKSSVDFILTLNKE |
| | | | RKGYAKAFQDIRKMNKDEKPSEYMSYIQSQLMLYQKKQEEKEKINHFEKFINQVFI |
| | | | KGFNSFIEKNRLTYICHPTKNTVPENDNIEIPFHTDMDDSNIAFWLMCKLLDAKQLS |
| | | | ELRNEMIKFSCSLQSTEETSTFTKAREVIGLALLNGEKGCNDWKELFDDKEAWKKN |
| | | | MSLYVSEELLQSLPYTQEDGQTPVINRSIDLVKKYGTETILEKLFSSSDDYKVSAKD |
| | | | IAKLHEYDVTEKIAQQESLHKQWIEKPGLARDSAWTKKYQNVINDISNYQWAKTK |
| | | | VELTQVRHLHQLTIDLLSRLAGYMSIADRDFQFSSNYILERENSEYRVTSWILLSEN |
| | | | KNKNKYNDYELYNLKNASIKVSSKNDPQLKVDLKQLRLTLEYLELFDNRLKEKRN |
| | | | NISHFNYLNGQLGNSILELFDDARDVLSYDRKLKNAVSKSLKEILSSHGMEVTFKP |
| | | | LYQTNHHLKIDKLQPKKIHHLGEKSTVSSNQVSNEYCQLVRTLLTMK |
| C2-17 | | Leptotrichia | MKVTKVGGISHKKYTSEGRLVKSESEENRTDERLSALLNMRLDMYIKNPSSTETK |
| (SEQ ID | | buccalis C- | ENQKRIGKLKKFFSNKMVYLKDNTLSLKNGKKENIDREYSETDILESDVRDKKNF |
| NO: 66) | | 1013-b | AVLKKIYLNENVNSEELEVFRNDIKKKLNKINSLKYSFEKNKANYQKINENNIEKV |
| | | | EGKSKRNIIYDYYRESAKRDAYVSNVKEAFDKLYKEEDIAKLVLEIENLTKLEKYK |
| | | | IREFYHEIIGRKNDKENFAKIIYEEIQNVNNMKELIEKVPDMSELKKSQVFYKYYLD |
| | | | KEELNDKNIKYAFCHFVEIEMSQLLKNYVYKRLSNISNDKIKRIFEYQNLKKLIENK |
| | | | LLNKLDTYVRNCGKYNYYLQDGEIATSDFIARNRQNEAFLRNIIGVSSVAYFSLRNI |
| | | | LETENENDITGRMRGKTVKNNKGEEKYVSGEVDKIYNENKKNEVKENLKMFYSY |
| | | | DFNMDNKNEIEDFFANIDEAISSIRHGIVHFNLELEGKDIFAFKNIAPSEISKKMFQN |
| | | | EINEKKLKLKIFRQLNSANVFRYLEKYKILNYLKRTRFEFVNKNIPFVPSFTKLYSRI |
| | | | DDLKNSLGIYWKTPKTNDDNKTKEIIDAQIYLLKNIYYGEFLNYFMSNNGNFFEISK |
| | | | EIIELNKNDKRNLKTGFYKLQKFEDIQEKIPKEYLANIQSLYMINAGNQDEEEKDTY |
| | | | IDFIQKIFLKGFMTYLANNGRLSLIYIGSDEETNTSLAEKKQEFDKFLKKYEQNNNI |
| | | | KIPYEINEFLREIKLGNILKYTERLNMFYLILKLLNHKELTNLKGSLEKYQSANKEE |
| | | | AFSDQLELINLLNLDNNRVTEDFELEADEIGKFLDFNGNKVKINKELKKFDTNKIY |
| | | | FDGENIIKHRAFYNIKKYGMLNLLEKIADKAGYKISIEELKKYSNKKNEIEKNHKM |
| | | | QENLHRKYARPRKDEKFTDEDYESYKQAIENIEEYTHLKNKVEFNELNLLQGLLLR |
| | | | ILHRLVGYTSIWERDLRFRLKGEFPENQYIEEIFNFENKKNVKYKGGQIVEKYIKFY |
| | | | KELHQNDEVKINKYSSANIKVLKQEKKDLYIRNYIAHFNYIPHAEISLLEVLENLRK |
| | | | LLSYDRKLKNAVMKSVVDILKEYGFVATFKIGADKKIGIQTLESEKIVHLKNLKKK |
| | | | KLMTDRNSEELCKLVKIMFEYKMEEKKSEN |
| C2-18 | | Herbinix | MKLTRRRISGNSVDQKITAAFYRDMSQGLLYYDSEDNDCTDKVIESMDFERSWRG |
| (SEQ ID | | hemicellulo- | RILKNGEDDKNPFYMFVKGLVGSNDKIVCEPIDVDSDPDNLDILINKNLTGFGRNL |
| NO: 67) | | silytica | KAPDSNDTLENLIRKIQAGIPEEEVLPELKKIKEMIQKDIVNRKEQLLKSIKNNRIPFS |
| | | | LEGSKLVPSTKKMKWLFKLIDVPNKTFNEKMLEKYWEIYDYDKLKANITNRLDKT |
| | | | DKKARSISRAVSEELREYHKNLRTNYNRFVSGDRPAAGLDNGGSAKYNPDKEEFL |
| | | | LFLKEVEQYFKKYFPVKSKHSNKSKDKSLVDKYKNYCSYKVVKKEVNRSIINQLV |
| | | | AGLIQQGKLLYYFYYNDTWQEDFLNSYGLSYIQVEEAFKKSVMTSLSWGINRLTS |
| | | | FFIDDSNTVKFDDITTKKAKEAIESNYFNKLRTCSRMQDHFKEKLAFFYPVYVKDK |
| | | | KDRPDDDIENLIVLVKNAIESVSYLRNRTFHFKESSLLELLKELDDKNSGQNKIDYS |
| | | | VAAEFIKRDIENLYDVFREQIRSLGIAEYYKADMISDCFKTCGLEFALYSPKNSLMP |
| | | | AFKNVYKRGANLNKAYIRDKGPKETGDQGQNSYKALEEYRELTWYIEVKNNDQS |
| | | | YNAYKNLLQLIYYHAFLPEVRENEALITDFINRTKEWNRKETEERLNTKNNKKHK |
| | | | NFDENDDITVNTYRYESIPDYQGESLDDYLKVLQRKQMARAKEVNEKEEGNNNYI |
| | | | QFIRDVVVWAFGAYLENKLKNYKNELQPPLSKENIGLNDTLKELFPEEKVKSPFNI |
| | | | KCRFSISTFIDNKGKSTDNTSAEAVKTDGKEDEKDKKNIKRKDLLCFYLFLRLLDE |
| | | | NEICKLQHQFIKYRCSLKERRFPGNRTKLEKETELLAELEELMELVRFTMPSIPEISA |
| | | | KAESGYDTMIKKYFKDFIEKKVFKNPKTSNLYYHSDSKTPVTRKYMALLMRSAPL |
| | | | HLYKDIFKGYYLITKKECLEYIKLSNIIKDYQNSLNELHEQLERIKLKSEKQNGKDS |
| | | | LYLDKKDFYKVKEYVENLEQVARYKHLQHKINFESLYRIFRIHVDIAARMVGYTQ |
| | | | DWERDMHFLFKALVYNGVLEERRFEAIFNNNDDNNDGRIVKKIQNNLNNKNREL |
| | | | VSMLCWNKKLNKNEFGAIIWKRNPIAHLNHFTQTEQNSKSSLESLINSLRILLAYDR |
| | | | KRQNAVTKTINDLLLNDYHIRIKWEGRVDEGQIYENIKEKEDIENEPIIHLKHLHKK |
| | | | DCYIYKNSYMFDKQKEWICNGIKEEVYDKSILKCIGNLFKFDYEDKNKSSANPKHT |
| C2-19 | | [Eubacterium] | MLRRDKEVKKLYNVFNQIQVGTKPKKWNNDEKLSPEENERRAQQKNIKMKNYK |
| (SEQ ID | | rectale | WREACSKYVESSQRIINDVIFYSYRKAKNKLRYMRKNEDILKKMQEAEKLSKFSG |
| NO: 68) | | | GKLEDFVAYTLRKSLVVSKYDTQEFDSLAAMVVFLECIGKNNISDHEREIVCKLLE |
| | | | LIRKDFSKLDPNVKGSQGANIVRSVRNQNMIVQPQGDRFLFPQVYAKENETVTNK |
| | | | NVEKEGLNEFLLNYANLDDEKRAESLRKLRRILDVYFSAPNHYEKDMDITLSDNIE |
| | | | KEKENVWEKHECGKKETGLEVDIPDVLMEAEAENIKLDAVVEKRERKVLNDRVR |
| | | | KQNIICYRYTRAVVEKYNSNEPLFFENNAINQYWIHMENAVERILKNCKAGKLEK |
| | | | LRKGYLAEKVWKDAINLISIKYIALGKAVYNFALDDIWKDKKNKELGIVDERIRNG |
| | | | ITSFDYEMIKAHENLQRELAVDIAFSVNNLARAVCDMSNLGNKESDFLLWKRNDI |
| | | | ADKLKNKDDMASVSAVLQFFGGKSSWDINIFKDAYKGKKKYNYEVREDDLRKAI |
| | | | YCARNENFHEKTALVNDEKWNTELFGKIFERETEFCLNVEKDREYSNNLYMFYQV |
| | | | SELRNMLDHLYSRSVSRAAQVPSYNSVIVRTAFPEYITNVLGYQKPSYDADTLGK |
| | | | WYSACYYLLKEIYYNSFLQSDRALQLFEKSVKTLSWDDKKQQRAVDNEKDHESDI |
| | | | KSACTSLAQVCQIYMTEYNQQNNQIKKVRSSNDSIFDQPVYQHYKVLLKKAIANA |
| | | | FADYLKNNKDLFGFIGKPFKANEIREIDKEQFLPDWTSRKYEALCIEVSGSQELQK |
| | | | WYIVGKELNARSLNLMVGSMRSYIQYVTDIKRRAASIGNELHVSVHDVEKVEKW |
| | | | VQVIEVCSLLASRTSNQFEDYFNDKDDYARYLKSYVDFSNVDMPSEYSALVDFSN |
| | | | EEQSDLYVDPKNPKVNRNIVHSKLFAADIELRDIVEPVSKDNIEEFYSQKAEIAYCK |
| | | | IKGKEITAEEQKAVLKYQKLKNRVELRDIVEYGEIINELLGQLINWSFMRERDLLYF |
| | | | QLGFHYDCLRNDSKKPEGYKNIKVDENSIKDAILYQIIGMYVNGVTVYAPEKDGD |
| | | | KLKEQCVKGGVGVKVSAFHRYSKYLGLNEKTLYNAGLEIFEVVAEHEDIINLRNGI |
| | | | DHFKYYLGDYRSMLSIYSEVEDREFTYDIKYQKNVLNLLQNILLRHNVIVEPILESG |
| | | | FKTIGEQTKPGAKLSIRSIKSDTFQYKVKGGTLITDAKDERYLETIRKILYVAENEED |
| | | | NLKKSVVVTNADKYEKNKESDDQNKQKEKKNKDNKGKKNEETKSDAEKNNNER |
| | | | LSYNPFANLNFKLSN |
| C2-20 | | Eubacteriaceae | MKISKESHKRTAVAVMEDRVGGVVYVPGGSGIDLSNNLKKRSMDTKSLYNVFNQ |
| (SEQ ID | | bacterium | IQAGTAPSEYEWKDYLSEAENKKREAQKMIQKANYELRRECEDYAKKANLAVSRI |
| NO: 69) | | CHKCI004 | IFSKKPKKIFSDDDIISHMKKQRLSKFKGRMEDEVLIALRKSLVVSTYNQEVEDSRK |
| | | | AATVFLKNIGKKNISADDERQIKQLMALIREDYDKWNPDKDSSDKKESSGTKVIRS |
| | | | IEHQNMVIQPEKNKLSLSKISNVGKKTKTKQKEKAGLDAFLKEYAQIDENSRMEY |
| | | | LKKLRRLLDTYFAAPSSYIKGAAVSLPENINFSSELNVWERHEAAKKVNINFVEIPE |
| | | | SLLNAEQNNNKINKVEQEHSLEQLRTDIRRRNITCYHFANALAADERYHTLFFENM |
| | | | AMNQFWIEIHMENAVERILKKCNVGTLFKLRIGYLSEKVWKDMLNLLSIKYIALGK |
| | | | AVYHFALDDIWKADIWKDASDKNSGKINDLTLKGISSFDYEMVKAQEDLQREMA |
| | | | VGVAFSTNNLARVTCKMDDLSDAESDELLWNKEAIRRHVKYTEKGEILSAILQFFG |
| | | | GRSLWDESLFEKAYSDSNYELKFLDDLKRAIYAARNETFHFKTAAIDGGSWNTRL |
| | | | FGSLFEKEAGLCLNVEKNKFYSNNLVLFYKQEDLRVFLDKLYGKECSRAAQIPSY |
| | | | NTILPRKSFSDFMKQLLGLKEPVYGSAILDQWYSACYYLEKEVYYNLFLQDSSAK |
| | | | ALFEKAVKALKGADKKQEKAVESFRKRYWEISKNASLAEICQSYITEYNQQNNKE |
| | | | RKVRSANDGMFNEPIYQHYKMLLKEALKMAFASYIKNDKELKEVYKPTEKLFEVS |
| | | | QDNFLPNWNSEKYNTLISEVKNSPDLQKWYIVGKFMNARMLNLLLGSMRSYLQY |
| | | | VSDIQKRAAGLGENQLHLSAENVGQVKKWIQVLEVCLLLSVRISDKFTDYFKDEE |
| | | | EYASYLKEYVDFEDSAMPSDYSALLAFSNEGKIDLYVDASNPKVNRNIIQAKLYAP |
| | | | DMVLKKVVKKISQDECKEFNEKKEQIMQFKNKGDEVSWEEQQKILEYQKLKNRV |
| | | | ELRDLSEYGELINELLGQLINWSYLRERDLLYFQLGFHYSCLMNESKKPDAYKTIft |
| | | | RGTVSIENAVLYQIIAMYINGFPVYAPEKGELKPQCKTGSAGQKIRAFCQWASMVE |
| | | | KKKYELYNAGLELFEVVKEHDNIIDLRNKIDHFKYYQGNDSILALYGEIFDRFFTY |
| | | | DMKYRNNVLNHLQNILLRHNVIIKPIISKDKKEVGRGKMKDRAAELLEEVSSDRFT |
| | | | YKVKEGERKIDAKNRLYLETVRDILYFPNRAVNDKGEDVIICSKKAQDLNEKKAD |
| | | | RDKNHDKSKDTNQKKEGKNQEEKSENKEPYSDRMTWKPFAGIKLE |
| C2-21 | | Blautia sp. | MKISKVDHVKSGIDQKLSSQRGMLYKQPQKKYEGKQLEEHVRNLSRKAKALYQV |
| (SEQ ID | | Marseille- | FPVSGNSKMEKELQIINSFIKNILLRLDSGKTSEEIVGYINTYSVASQISGDHIQELVD |
| NO: 70) | | P2398 | QHLKESLRKYTCVGDKRIYVPDIIVALLKSKENSETLQYDNSELKILIDFIREDYLKE |
| | | | KQIKQIVHSIENNSTPLRIAEINGQKRLIPANVDNPKKSYIFEFLKEYAQSDPKGQES |
| | | | LLQHMRYLILLYLYGPDKITDDYCEEIEAWNFGSIVMDNEQLFSEEASMLIQDRIY |
| | | | VNQQIEEGRQSKDTAKVKKNKSKYRMLGDKIEHSINESVVKHYQEACKAVEEKDI |
| | | | PWIKYISDHVMSVYSSKNRVDLDKLSLPYLAKNTWNTWISFIAMKYVDMGKGVY |
| | | | HFAMSDVDKVGKQDNLIIGQIDPKFSDGISSEDYERIKAEDDLHRSMSGYIAFAVN |
| | | | NFARAICSDEFRKKNRKEDVLTVGLDEIPLYDNVKRKLLQYFGGASNWDDSIIDIID |
| | | | DKDLVACIKENLYVARNVNEHFAGSEKVQKKQDDILEEIVRKETRDIGKHYRKVF |
| | | | YSNNVAVEYCDEDIIKLMNHLYQREKPYQAQIPSYNKVISKTYLPDLIFMLLKGKN |
| | | | RTKISDPSIMNMFRGTFYFLLKEIYYNDFLQASNLKEMFCEGLKNNVKNKKSEKPY |
| | | | QNFMRRFEELENMGMDFGEICQQIMTDYEQQNKQKKKTATAVMSEKDKKIRTLD |
| | | | NDTQKYKHERTLLYIGLREAFITYLKDEKNKEWYEFLREPVKREQPEEKEFVNKW |
| | | | KLNQYSDCSELILKDSLAAAWYVVAHFINQAQLNHLIGDIKNYIQFISDIDRRAKST |
| | | | GNPVSESTEIQIERYRKILRVLEFAKFFCGQITNVLTDYYQDENDFSTHVGHYVKFE |
| | | | KKNMEPAHALQAFSNSLYACGKEKKKAGFYYDGMNPIVNRNITLASMYGNKKLL |
| | | | ENAMNPVTEQDIRKYYSLMAELDSVLKNGAVCKSEDEQKNLRHFQNLKNRIELV |
| | | | DVLTLSELVNDLVAQLIGWVYIRERDMMYLQLGLHYIKLYFTDSVAEDSYLRTLD |
| | | | LEEGSIADGAVLYQIASLYSFNLPMYVKPNKSSVYCKKHVNSVATKFDIFEKEYCN |
| | | | GDETVIENGLRLFENINLHKDMVKFRDYLAHFKYFAKLDESILELYSKAYDFFFSY |
| | | | NIKLKKSVSYVLTNVLLSYFINAKLSFSTYKSSGNKTVQHRTTKISVVAQTDYFTY |
| | | | KLRSIVKNKNGVESIENDDRRCEVVNIAARDKEFVDEVCNVINYNSDK |
| C2-22 | | Leptotrichia sp. | MGNLFGHKRWYEVRDICGDFKIKRKVKVKRNYDGNKYILNINENNNKEKIDNNKF |
| (SEQ ID | | oral taxon 879 | IGEFVNYKKNNNVLKEFKRKFHAGNILFKLKGKEEIIRIENNDDFLETEEVVLYIEV |
| NO: 71) | | str. F0557 | YGKSEKLKALEITKKKIIDEAIRQGITKDDKKIEEKRQENEEEIEIDIRDEYTNKTLND |
| | | | CSIILRIIENDELETKKSIYEIFKNINMSLYKIIEKIIENETEKVFENRYYEEHLREKLLK |
| | | | DNKIDVILTNEMEIREKIKSNLEIMGFVKFYLNVSGDKKKSENKKMFVEKILNTNV |
| | | | DLTVEDIVDFIVKELKFWNITKRIEKVKKFNNEFLENRRNRTYIKSYVLLDKHEKFK |
| | | | IERENKKDKIVKFFVENIKNNSIKEKIEKILAEFKINELIKKLEKELKKGNCDTEIFGIF |
| | | | KKHYKVNFDSKKFSNKSDEEKELYKIIYRYLKGRIEKILVNEQKVRLKKMEKIEIEK |
| | | | ILNESILSEKILKRVKQYTLEHIMYLGKLRHNDIVKMTVNTDDFSRLHAKEELDLEL |
| | | | ITFFASTNMELNKIFNGKEKVTDFFGFNLNGQKITLKEKVPSFKLNILKKLNFINNE |
| | | | NNIDEKLSHFYSFQKEGYLLRNKILHNSYGNIQETKNLKGEYENVEKIIKELKVSD |
| | | | EEISKSLSLDVIFEGKVDIINKINSLKIGEYKDKKYLPSFSKIVLEITRKFREINKDKLF |
| | | | DIESEKIILNAVKYVNKILYEKITSNEENEFLKTLPDKLVKKSNNKKENKNLLSIEEY |
| | | | YKNAQVSSSKGDKKAIKKYQNKVTNAYLEYLENTFTEIIDFSKFNLNYDEIKTKIEE |
| | | | RIGDNKSKIIIDSISTNINITNDIEVIISIFALLNSNTYINKIRNRFFATSVWLEKQNGTK |
| | | | EYDYENIISILDEVLLINLLRENNITDILDLKNAIIDAKIVENDETYIKNYIFESNEEKL |
| | | | KKRLFCEELVDKEDIRKIFEDENFKFKSFIKKNEIGNFKINFGILSNLECNSEVEAKKI |
| | | | IGKNSKKLESFIQNIIDEYKSNIRTLFSSEFLEKYKEEIDNLVEDTESENKNKFEKIYY |
| | | | PKEHKNELYIYKKNLFLNIGNPNFDKIYGLISKDIKNVDTKILFDDDIKKNKISEIDAI |
| | | | LKNLNDKLNGYSNDYKAKYVNKLKENDDFFAKNIQNENYSSFGEFEKDYNKVSE |
| | | | YKKIRDLVEFNYLNKIESYLIDINWKLAIQMARFERDMHYIVNGLRELGIIKLSGYN |
| | | | TGISRAYPKRNGSDGFYTTTAYYKFFDEESYKKFEKICYGFGIDLSENSEINKPENES |
| | | | IRNYISHFYIVRNPFADYSIAEQIDRVSNLLSYSTRYNNSTYASVFEVFKKDVNLDY |
| | | | DELKKKFRLIGNNDILERLMKPKKVSVLELESYNSDYIKNLIIELLTKIENTNDTL |
| C2-23 | | Lachnospiraceae | MKISKVDHTRMAVAKGNQHRRDEISGILYKDPTKTGSIDFDERFKKLNCSAKILYH |
| (SEQ ID | | bacterium | VFNGIAEGSNKYKNIVDKVNNNLDRVLFTGKSYDRKSIIDIDTVLRNVEKINAFDRI |
| NO: 72) | | NK4A144 | STEEREQIIDDLLEIQLRKGLRKGKAGLREVLLIGAGVIVRTDKKQEIADFLEILDED |
| | | | FNKTNQAKNIKLSIENQGLVVSPVSRGEERIFDVSGAQKGKSSKKAQEKEALSAFL |
| | | | LDVADLDKNVRFEYLRKIRRLINLYFYVKNDDVMSLTEIPAEVNLEKDFDIWRDH |
| | | | EQRKEENGDFVGCPDILLADRDVKKSNSKQVKIAERQLRESIREKNIKRYRFSIKTI |
| | | | EKDDGTYFFANKQISVFWIFIRIENAVERILGSINDKKLYRLRLGYLGEKVWKDILN |
| | | | FLSIKYIAVGKAVFNFAMDDLQEKDRDIEPGKISENAVNGLTSFDYEQIKADEMLQ |
| | | | REVAVNVAFAANNLARVTVDIPQNGEKEDILLWNKSDIKKYKKNSKKGILKSILQF |
| | | | FGGASTWNMKMFEIAYHDQPGDYEENYLYDIIQIIYSLRNKSFHFKTYDHGDKNW |
| | | | NRELIGKMIEHDAERVISVEREKFHSNNLPMFYKDADLKKILDLLYSDYAGRASQV |
| | | | PAFNTVLVRKNEPEFLRIGDMGYKVHFNNPEVENQWHSAVYYLYKEIYYNLFLRD |
| | | | KEVKNLFYTSLKNIRSEVSDKKQKLASDDFASRCEEIEDRSLPEICQIIMTEYNAQN |
| | | | FGNRKVKSQRVIEKNKDIFRHYKMLLIKTLAGAFSLYLKQERFAFIGKATPIPYETT |
| | | | DVKNFLPEWKSGMYASFVEEIKNNLDLQEWYIVGRFLNGRMLNQLAGSLRSYIQY |
| | | | AEDIERRAAENRNKLFSKPDEKIEACKKAVRVLDLCIKISTRISAEFTDYFDSEDDY |
| | | | ADYLEKYLKYQDDAIKELSGSSYAALDHFCNKDDLKFDIYVNAGQKPILQRNIVM |
| | | | AKLFGPDNILSEVMEKVTESAIREYYDYLKKVSGYRVRGKCSTEKEQEDLLKFQR |
| | | | LKNAVEFRDVTEYAEVINELLGQLISWSYLRERDLLYFQLGFHYMCLKNKSFKPA |
| | | | EYVDIRRNNGTIIHNAILYQIVSMYINGLDFYSCDKEGKTLKPIETGKGVGSKIGQFI |
| | | | KYSQYLYNDPSYKLEIYNAGLEVFENIDEHDNITDLRKYVDHFKYVAYGNKMSLL |
| | | | DLYSEFFDRFFTYDMKYQKNVVNVLENILLRHFVIFYPKGGSGKKDVGIRDCKKER |
| | | | AQIEISEQSLTSEDFMFKLDDKAGEEAKKFPARDERYLQTIAKLLYYPNEIEDMNRF |
| | | | MKKGETINKKVQFNRKKKITRKQKNNSSNEVLSSTMGYLFKNIKL |
| C2-24 | | Chloroflexus | MTDQVRREEVAAGELADTPLAAAQTPAADAAVAATPAPAEAVAPTPEQAVDQPA |
| (SEQ ID | | aggregans | TTGESEAPVTTAQAAAHEAEPAEATGASETPVSEQQPQKPRRLKDLQPGMELEGK |
| NO: 73) | | | VTSIALYGIFVDVGVGRDGLVHISEMSDRRIDTPSELVQIGDTVKVWVKSVDLDAR |
| | | | RISLTMLNPSRGEKPRRSRQSQPAQPQPRRQEVDREKLASLKVGEIVEGVITGFAPF |
| | | | GAFADIGVGKDGLIHISELSEGRVEKPEDAVKVGERYQFKVLEIDGEGTRISLSLRR |
| | | | AQRTQRMQQLEPGQIIEGTVSGIATFGAFVDIGVGRDGLVHISALAPHRVAKVEDV |
| | | | VKVGDKVKVKVLGVDPQSKRISLTMRLEEEQPATTAGDEAAEPAEEVTPTRRGNL |
| | | | ERFAAAAQTARERSERGERSERGERRERRERRPAQSSPDTYIVGEDDDESFEGNATI |
| | | | EDLLTKFGGSSSRRDRDRRRRHEDDDDEEMERPSNRRQREAIRRTLQQIGYDE |
| C2-25 | | Demequina | MDLTWHALLILFIVALLAGFLDTLAGGGGLLTVPALLLTGIPPLQALGTNKLQSSF |
| (SEQ ID | | aurantiaca | GTGMATYQVIRKKRVHWRDVRWPMVWAFLGSAAGAVAVQFIDTDALLIIIPVVL |
| NO: 74) | | | ALVAAYFLEVPKSHLPPPEPRMSDPAYEATLVPIIGAYDGAFGPGTGSLYALSGVA |
| | | | LRAKTLVQSTAIAKTLNFATNFAALLVFAFAGHMLWTVGAVMIAGQLIGAYAGS |
| | | | HMLFRVNPLVLRVLIVVMSLGMLIRVLLD |
| C2-26 | | Thalassospira | MRIIKPYGRSHVEGVATQEPRRKLRLNSSPDISRDIPGFAQSHDALIIAQWISAIDKIA |
| (SEQ ID | | sp. TSL5-1 | TKPKPDKKPTQAQINLRTTLGDAAWQHVMAENLLPAATDPAIREKLHLIWQSKIA |
| NO: 75) | | | PWGTARPQAEKDGKPTPKGGWYERFCGVLSPEAITQNVARQIAKDIYDHLHVAA |
| | | | KRKGREPAKQGESSNKPGKFKPDRKRGLIEERAESIAKNALRPGSHAPCPWGPDD |
| | | | QATYEQAGDVAGQIYAAARDCLEEKKRRSGNRNTSSVQYLPRDLAAKILYAQYG |
| | | | RVFGPDTTIKAALDEQPSLFALHKAIKDCYHRLINDARKRDILRILPRNMAALFRLV |
| | | | RAQYDNRDINALIRLGKVIBYHASEQGKSEHHGIRDYWPSQQDIQNSRFWGSDGQ |
| | | | ADIKRHEAFSRIWRHIIALASRTLHDWADPHSQKFSGENDDILLLAKDAIEDDVFK |
| | | | AGHYERKCDVLFGAQASLFCGAEDFEKAILKQAITGTGNLRNATFHFKGKVRFEK |
| | | | ELQELTKDVPVEVQSAIAALWQKDAEGRTRQIAETLQAVLAGHFLTEEQNRHITA |
| | | | ALTAAMAQPGDVPLPRLRRVLARHDSICQRGRILPLSPCPDRAKLEESPALTCQYT |
| | | | VLKMLYDGPFRAWLAQQNSTILNHYIDSTIARTDKAARDMNGRKLAQAEKDLITS |
| | | | RAADLPRLSVDEKMGDFLARLTAATATEMRVQRGYQSDGENAQKQAAFIGQFEC |
| | | | DVIGRAFADFLNQSGEDEVLKLKADTPQPDAAQCDVTALIAPDDISVSPPQAWQQ |
| | | | VLYFILHLVPVDDASHLLHQIRKWQVLEGKEKPAQIAHDVQSVLMLYLDMHDAK |
| | | | FTGGAALHGIEKFAEFFAHAADFRAVFPPQSLQDQDRSIPRRGLREIVRFGHLPLLQ |
| | | | HMSGTVQITHDNVVAWQAARTAGATGMSPIARRQKQREELHALAVERTARERNA |
| | | | DLQNYMBALVDVIKHRQLSAQVTLSDQVRLHRLMMGVLGRLVDYAGLWERDLY |
| | | | FVVLALLYHHGATPDDVFKGQGKKNLADGQVVAALKPKNRKAAAPVGVFDDLD |
| | | | HYGIYQDDRQSIRNGLSHFNMLRGGKAPDLSHWVNQTRSLVAHDRKLKNAVAKS |
| | | | VIEMLAREGFDLDWGIQTDRGQHILSHGKIRTRQAQHFQKSRLHIVKKSAKPDKN |
| | | | DTVKIRENLHGDAMVERVVQLFAAQVQKRYDITVEKRLDHLFLKPQDQKGKNGI |
| | | | HTHNGWSKTEKKRRPSRENRKGNHEN |
| C2-27 | | SAMN04487830_ | MKESKESHRKTAVGVTESNGIIGLLYKDPLNEKEKIEDVVNQRANSTKRLFNLEGT |
| (SEQ ID | | 13920 | EATSKDISRASKDLAKVVNKAIGNLKGNKKENKKEQITKGLNTKIIVEELKNVLKD |
| NO: 76) | | [Pseudo- | EKKLIVNKDIIDEACSRLLKTSFRTAKTKQAVKMILTAVLIENTNLSKEDEAFVHEY |
| | | butyrivibrio | FVKKLVNEYNKTSVKKQIPVALSNQNMVIQPNSVNGTLEISETKKSKETKTTEKDA |
| | | sp. OR37] | FRAFLRDYATLDENRRHKMRLCLRNLVNLYFYGETSVSKDDFDEWRDHEDKKQN |
| | | | DELFVKKIVSIKTDRKGNVKEVLDVDATIDAIRTNNIACYRRALAYANENPDVFFS |
| | | | DTMLNKFWIEHVENEVERIYGHINNNTGDYKYQLGYLSEKVWKGIINYLSIKYIAE |
| | | | GKAVYNYAMNALAKDNNSNAFGKLDEKEVNGITSFEYERIKAEETLQRECAVNIA |
| | | | FAANHLANATVDLNEKDSDFLLLKHEDNKDTLGAVARPNILRNILQFFGGKSRWN |
| | | | DFDFSGIDEIQLLDDLRKWYSLRNSSFHFKTENIDNDSWNTKLIGDMFAYDFNMA |
| | | | GNVQKDKMYSNNVPMFYSTSDIEKMLDRLYAEVHERASQVPSENSVEVRKNFPD |
| | | | YLKNDLKITSAFGVDDALKWQSAVYYVCKEIYYNDFLQNPETFTMLKDYVQCLPI |
| | | | DIDKSMDQKLKSERNAHKNFKEAFATYCKECDSLSAICQMEVITEYNNQNKGNRK |
| | | | VISARTKDGDKLIYKHYKMILFEALKNVETIYLEKNINTYGELKKPKLINNVPAIEEF |
| | | | LPNYNGRQYETLVNRITEETELQKWYIVGRLLNPKQVNQLIGNFRSYVQYVNDVA |
| | | | RRAKQTGNNLSNDNIAWDVKNIIQIFDVCTKLNGVTSNILEDYFDDGDDYARYLK |
| | | | NFVDYTNKNNDHSATLLGDFCAKEIDGIKIGIYHDGTNPIVNRNIIQCKLYGATGIIS |
| | | | DLTKDGSILSVDYEIIKKYMQMQKEIKVYQQKGICKTKEEQQNLKKYQELKNIVEL |
| | | | RNIIDYSEILDELQGQLINWGYLRERDLMYFQLGEHYLCLHNESKKPVGYNNAGDI |
| | | | SGAVLYQIVAMYTNGLSLIDANGKSKKNAKASAGAKVGSFCSYSKEIRGVDKDTK |
| | | | EDDDPIYLAGVELFENINEHQQCINLRNYIEHEHYYAKHDRSMLDLYSEVEDREFT |
| | | | YDMKYTKNVPNMMYNILLQHLVVPAFEFGSSEKRLDDNDEQTKPRAMFTLREKN |
| | | | GLSSEQFTYRLGDGNSTVKLSARGDDYLRAVASLLYYPDRAPEGLIRDAEAEDKE |
| | | | AKINHSNPKSDNRNNRGNFKNPKVQTKRK |
| C2-28 | | SAMN02910398_ | MKISKVDHRKTAVKITDNKGAEGFIYQDPTRDSSTMEQIISNRARSSKVLENIFGDT |
| (SEQ ID | | 00008 | KKSKDLNKYTESLIIYVNKAIKSLKGDKRNNKYEEITESLKTERVLNALIQAGNEFT |
| NO: 77) | | [Butyrivibrio | CSENNIEDALNKYLKKSERVGNTKSALKKLLMAAYCGYKLSIEEKEEIQNYFVDK |
| | | sp. YAB3001] | LVKEYNKDTVLKYTAKSLKHQNMVVQPDTDNHVFLPSRIAGATQNKMSEKEALT |
| | | | EFLKAYAVLDEEKRHNLRIILRKLVNLYFYESPDFIYPENNEWKEHDDRKNKTETF |
| | | | VSPVKVNEEKNGKTFVKIDVPATKDIIRLKNIECYRRSVAETAGNPITYFTDHNISK |
| | | | FWIHMENEVEKIFALLKSNWIGDYQFSVGYISEKVWKEIINYLSIKYIAIGKAVYNY |
| | | | ALEDIKKNDGTLNEGVIDPSFYDGINSFEYEKIKAEETFQREVAVYVSFAVNHLSSA |
| | | | TVKLSEAQSDMLVLNKNDIEKIAYGNTKRNILQFFGGQSKWKEFDFDRYINPVNY |
| | | | TDIDELFDIKKMVYSLRNESFEETTTDTESDWNKNLISAMFEYECRRISTVQKNKFF |
| | | | SNNLPLFYGENSLERVLHKLYDDYVDRMSQVPSFGNVEVRKKEPDYMKEIGIKHN |
| | | | LSSEDNLKLQGALYFLYKEIYYNAFISSEKAMKIFVDLVNKLDTNARDDKGRITHE |
| | | | AMAHKNFKDAISHYMTHDCSLADICQKIMTEYNQQNTGHRKKQTTYSSEKNPEIF |
| | | | RHYKMILFMLLQKAMTEYISSEEIFDFIMKPNSPKTDIKEEEFLPQYKSCAYDNLIK |
| | | | LIADNVELQKWYITARLLSPREVNQLIGSFRSYKQFVSDIERRAKETNNSLSKSGMT |
| | | | VDVENITKVLDLCTKLNGRFSNELTDYFDSKDDYAVYVSKFLDEGFKIDEKEPAAL |
| | | | LGEFCNKEENGKKIGIYHNGTEPILNSNIIKSKLYGITDVVSRAVKPVSEKLIREYLQ |
| | | | QEVKIKPYLENGVCKNKEEQAALRKYQELKNRIEFRDIVEYSEIINELMGQLINFSY |
| | | | LRERDLMYFQLGFHYLCLNNYGAKPEGYYSIVNDKRTIKGAILYQIVAMYTYGLPI |
| | | | YHYVDGTISDRRKNKKTVLDTLNSSETVGAKIKYFIYYSDELFNDSLILYNAGLELF |
| | | | ENINEHENIVNLRKYIDHFKYYVSQDRSLLDIYSEVFDRYFTYDRKYKKNVMNLFS |
| | | | NIMLKHFIITDFEFSTGEKTIGEKNTAKKECAKVRIKRGGLSSDKFTYKFKDAKPIEL |
| | | | SAKNTEFLDGVARILYYPENVVLTDLVRNSEVEDEKRIEKYDRNHNSSPTRKDKTY |
| | | | KQDVKKNYNKKTSKAFDSSKLDTKSVGNNLSDNPVLKQFLSESKKKR |
| C2-29 | | Blautia sp. | MKISKVDHVKSGIDQKLSSQRGMLYKQPQKKYEGKQLEEHVRNLSRKAKALYQV |
| (SEQ ID | | Marseille- | FPVSGNSKMEKELQIINSFIKNILLRLDSGKTSEEIVGYINTYSVASQISGDHIQELVD |
| NO: 78) | | P2398 | QHLKESLRKYTCVGDKRIYVPDIIVALLKSKENSETLQYDNSELKILIDFIREDYLKE |
| | | | KQIKQIVHSIENNSTPLRIAEINGQKRLIPANVDNPKKSYIFEFLKEYAQSDPKGQES |
| | | | LLQHMRYLILLYLYGPDKITDDYCEEIEAWNFGSIVMDNEQLFSEEASMLIQDRIY |
| | | | VNQQIEEGRQSKDTAKVKKNKSKYRMLGDKIEHSINESVVKHYQEACKAVEEKDI |
| | | | PWIKYISDHVMSVYSSKNRVDLDKLSLPYLAKNTWNTWISFIAMKYVDMGKGVY |
| | | | HFAMSDVDKVGKQDNLIIGQIDPKFSDGISSEDYERIKAEDDLHRSMSGYIAFAVN |
| | | | NFARAICSDEFRKKNRKEDVLTVGLDEIPLYDNVKRKLLQYFGGASNWDDSIIDIID |
| | | | DKDLVACIKENLYVARNVNEHFAGSEKVQKKQDDILEEIVRKETRDIGKHYRKVF |
| | | | YSNNVAVEYCDEDIIKLMNHLYQREKPYQAQIPSYNKVISKTYLPDLIFMLLKGKN |
| | | | RTKISDPSIMNMFRGTFYFLLKEIYYNDFLQASNLKEMFCEGLKNNVKNKKSEKPY |
| | | | QNFMRRFEELENMGMDFGEICQQIMTDYEQQNKQKKKTATAVMSEKDKKIRTLD |
| | | | NDTQKYKHERTLLYIGLREAFITYLKDEKNKEWYEFLREPVKREQPEEKEFVNKW |
| | | | KLNQYSDCSELILKDSLAAAWYVVAHFINQAQLNHLIGDIKNYIQFISDIDRRAKST |
| | | | GNPVSESTEIQIERYRKIIRVLEFAKFFCGQITNVLTDYYQDENDFSTHVGHYVKFE |
| | | | KKNMEPAHALQAFSNSLYACGKEKKKAGFYYDGMNPIVNRNITLASMYGNKKLL |
| | | | ENAMNPVTEQDIRKYYSLMAELDSVLKNGAVCKSEDEQKNLRHFQNLKNRIELV |
| | | | DVLTLSELVNDLVAQLIGWVYIRERDMMYLQLGLHYIKLYFTDSVAEDSYLRTLD |
| | | | LEEGSIADGAVLYQIASLYSFNLPMYVKPNKSSVYCKKHVNSVATKEDIFEKEYCN |
| | | | GDETVIENGLRLFENINLHKDMVKFRDYLAHFKYFAKLDESILELYSKAYDFFFSY |
| | | | NIKLKKSVSYVLTNVLLSYFINAKLSFSTYKSSGNKTVQHRTTKISVVAQTDYFTY |
| | | | KLRSIVKNKNGVESIENDDRRCEVVNIAARDKEFVDEVCNVINYNSDK |
| C2-30 | | Leptotrichia sp. | MKITKIDGISHKKYIKEGKLVKSTSEENKTDERLSELLTIRLDTYIKNPDNASEEENR |
| (SEQ ID | | Marseille- | IRRENLKEFFSNKVLYLKDGILYLKDRREKNQLQNKNYSEEDISEYDLKNKNNFLV |
| NO: 79) | | P3007 | LKKILLNEDINSEELEIFRNDFEKKLDKINSLKYSLEENKANYQKINENNIKKVEGK |
| | | | SKRNIFYNYYKDSAKRNDYINNIQEAFDKLYKKEDIENLFELIENSKKHEKYKIREC |
| | | | YHKIIGRKNDKENFATIIYEEIQNVNNMKELIEKVPNVSELKKSQVFYKYYLNKEK |
| | | | LNDENIKYVFCHFVEIEMSKLLKNYVYKKPSNISNDKVKRIFEYQSLKKLIENKLLN |
| | | | KLDTYVRNCGKYSFYLQDGEIATSDFIVGNRQNEAFLRNIIGVSSTAYFSLRNILET |
| | | | ENENDITGRMRGKTVKNNKGEEKYISGEIDKLYDNNKQNEVKKNLKMFYSYDFN |
| | | | MNSKKEIEDFFSNIDEAISSIRHGIVHFNLELEGKDIFTFKNIVPSQISKKMIEDEINE |
| | | | KKLKLKIFKQLNSANVERYLEKYKILNYLNRTRFEFVNKNIPFVPSETKLYSRIDDL |
| | | | KNSLGIYWKTPKTNDDNKTKEITDAQIYLLKNIYYGEFLNYEMSNNGNEFEITKEII |
| | | | ELNKNDKRNLKTGFYKLQKFENLQEKTPKEYLANIQSLYMINAGNQDEEEKDTYI |
| | | | DFIQKIFLKGFMTYLANNGRLSLIYIGSDEETNTSLAEKKQEFDKFLKKYEQNNNIEI |
| | | | PYEINEFVREIKLGKILKYTERLNMFYLILKLLNHKELTNLKGSLEKYQSANKEEAF |
| | | | SDQLELINLLNLDNNRVTEDFELEADEIGKELDENGNKVKDNKELKKEDTNKIYED |
| | | | GENIIKHRAFYNIKKYGMLNLLEKISDEAKYKISIEELKNYSKKKNEIEENHTTQEN |
| | | | LHRKYARPRKDEKFTDEDYKKYEKAIRNIQQYTHLKNKVEFNELNLLQSLLLRILH |
| | | | RLVGYTSIVVERDLRFRLKGEFPENQYIEEIFNEDNSKNVKYKNGQIVEKYINFYKEL |
| | | | YKDDTEKISIYSDKKVKELKKEKKDLYIRNYIAHENYIPNAEISLLEMLENLRKLLS |
| | | | YDRKLKNAIMKSIVDILKEYGFVVTFKIEKDKKIRIESLKSEEVVHLKKLKLKDND |
| | | | KKKEPIKTYRNSKELCKLVKVMFEYKMKEKKSEN |
| C2-31 | | Bacteroides | MRITKVKVKESSDQKDKMVLIHRKVGEGTLVLDENLADLTAPIIDKYKDKSFELSL |
| (SEQ ID | | ihuae | LKQTLVSEKEMNIPKCDKCTAKERCLSCKQREKRLKEVRGAIEKTIGAVIAGRDIIP |
| NO: 80) | | | RLNIFNEDEICWLIKPKLRNEFTEKDVNKQVVKLNLPKVLVEYSKKNDPTLFLAYQ |
| | | | QWIAAYLKNKKGHIKKSILNNRVVIDYSDESKLSKRKQALELWGEEYETNQRIALE |
| | | | SYHTSYNIGELVTLLPNPEEYVSDKGEIRPAFHYKLKNVLQMHQSTVEGTNEILCIN |
| | | | PIFNENRANIQLSAYNLEVVKYFEHYFPIKKKKKNLSLNQAIYYLKVETLKERLSLQ |
| | | | LENALRMNLLQKGKIKKHEFDKNTCSNTLSQIKRDEFFVLNLVEMCAFAANNIRNI |
| | | | VDKEQVNEILSKKDLCNSLSKNTIDKELCTKEYGADFSQIPVAIWAMRGSVQQIRN |
| | | | EIVHYKAEAIDKIFALKTFEYDDMEKDYSDTPFKQYLELSIEKIDSFFIEQLSSNDVL |
| | | | NYYCTEDVNKLLNKCKLSLRRTSIPFAPGFKTIYELGCHLQDSSNTYRIGHYLMLIG |
| | | | GRVANSTVTKASKAYPAYRFMLKLIYNHLFLNKFLDNHNKRFFMKAVAFVLKDN |
| | | | RENARNKFQYAFKEIRMMNNDESIASYMSYIHSLSVQEQEKKGDKNDKVRYNTE |
| | | | KFIEKVEVKGFDDFLSWLGVEFILSPNQEERDKTVTREEYENLMIKDRVEHSINSNQ |
| | | | ESHIAFFTECKLLDANHLSDLRNEWIKERSSGDKEGESYNFAIDIIELCLLTVDRVEQ |
| | | | RRDGYKEQTELKEYLSFFIKGNESENTVWKGFYFQQDNYTPVLYSPIELIRKYGTL |
| | | | ELLKLIIVDEDKITQGEFEEWQTLKKVVEDKVTRRNELHQEWEDMKNKSSFSQEK |
| | | | CSIYQKLCRDIDRYNWLDNKLHLVHLRKLHNLVIQILSRMARFIALWDRDEVLLD |
| | | | ASRANDDYKLLSFFNERDFINAKKTKTDDELLAEFGSKIEKKNAPFIKAEDVPLMV |
| | | | ECIEAKRSFYQKVFERNNLQVLADRNFIAHYNYISKTAKCSLFEMIIKLRTLMYYD |
| | | | RKLRNAVVKSIANVEDQNGMVLQLSLDDSHELKVDKVISKRIVHLKNNNIMTDQV |
| | | | PEEYYKICRRLLEMKK |
| C2-32 | | SAMN05216357_ | MEFRDSIFKSLLQKEIEKAPLCFAEKLISGGVFSYYPSERLKEFVGNHPFSLFRKTMP |
| (SEQ ID | | 1045 | FSPGFKRVMKSGGNYQNANRDGREYDLDIGVYLPKDGEGDEEWNARYFLMKLIY |
| NO: 81) | | [Porphyromona | NQLFLPYFADAENHLFRECVDEVKRVNRDYNCKNNNSEEQAFIDIRSMREDESIAD |
| | | daceae | YLAFIQSNIIIEENKKKETNKEGQINFNKFLLQVFVKGFDSFLKDRTELNFLQLPELQ |
| | | bacterium | GDGTRGDDLESLDKLGAVVAVDLKLDATGIDADLNENISFYTECKLLDSNHLSRL |
| | | KH3 CP3RA] | RNEIIKYQSANSDFSHNEDFDYDRIISIIELCMLSADHVSTNDNESIFPNNDKDFSGIR |
| | | | PYLSTDAKVETFEDLYVHSDAKTPITNATMVLNWKYGTDKLFERLMISDQDFLVT |
| | | | EKDYFVWKELKKDIEEKIKLREELHSLWVNTPKGKKGAKKKNGRETTGEFSEENK |
| | | | KEYLEVCREIDRYVNLDNKLHFVHLKRMHSLLIELLGREVGFTYLFERDYQYYHL |
| | | | EIRSRRNKDAGVVDKLEYNKIKDQNKYDKDDFFACTFLYEKANKVRNFIAHENYL |
| | | | TMWNSPQEEEHNSNLSGAKNSSGRQNLKCSLTELINELREVMSYDRKLKNAVTKA |
| | | | VIDLEDKHGMVIKFRIVNNNNNDNKNKHHLELDDIVPKKIMHLRGIKLKRQDGKPI |
| | | | PIQTDSVDPLYCRMWKKLLDLKPTPF |
| C2-33 | | Listeria | MHDAWAENPKKPQSDAFLKEYKACCEAIDTYNWHKNKATLVYVNELHHLLIDIL |
| (SEQ ID | | riparia | GRLVGYVAIADRDFQCMANQYLKSSGHTERVDSWINTIRKNRPDYIEKLDIFMNK |
| NO: 82) | | | AGLEVSEKNGRNYIAHLNYLSPKHKYSLLYLFEKLREMLKYDRKLKNAVTKSLID |
| | | | LLDKHGMCVVFANLKNNKHRLVIASLKPKKIETFKWKKIK |
| C2-34 | | Insolitis- | MRIIRPYGSSTVASPSPQDAQPLRSLQRQNGTEDVAEFSRRHPELVLAQWVAMLD |
| (SEQ ID | | pirillum | KIIRKPAPGKNSTALPRPTAEQRRLRQQVGAALWAEMQRHTPVPPELKAVWDSKV |
| NO: 83) | | peregrinum | HPYSKDNAPATAKTPSHRGRWYDREGDPETSAATVAEGVRRHLLDSAQPFRANG |
| | | | GQPKGKGVIEHRALTIQNGTLLHHHQSEKAGPLPEDWSTYRADELVSTIGKDARW |
| | | | IKVAASLYQHYGRIFGPTTPISEAQTRPEFVLHTAVKAYYRRLFKERKLPAERLERL |
| | | | LPRTGEALRHAVTVQHGNRSLADAVRIGKILHYGWLQNGEPDPWPDDAALYSSR |
| | | | YWGSDGQTDIKHSEAVSRVWRRALTAAQRTLTSWLYPAGTDAGDILLIGQKPDSI |
| | | | DRNRLPLLYGDSTRHWTRSPGDVWLFLKQTLENLRNSSFHFKTLSAFTSHLDGTCE |
| | | | SEPAEQQAAQALWQDDRQQDHQQVFLSLRALDATTYLPTGPLHRIVNAVQSTDA |
| | | | TLPLPRFRRVVTRAANTRLKGFPVEPVNRRTMEDDPLLRCRYGVLKLLYERGFRA |
| | | | WLETRPSIASCLDQSLKRSTKAAQTINGKNSPQGVEILSRATKLLQAEGGGGHGEH |
| | | | DLFDRLYAATAREMRVQVGYHHDAEAARQQAEFIEDLKCEVVARAFCAYLKTLG |
| | | | IQGDIIRRQPEPLPTWPDLPDLPSSTIGTAQAALYSVLHLMPVEDVGSLLHQLRRW |
| | | | LVALQARGGEDGTAITATIPLLELYLNRHDAKFSGGGAGTGLRWDDWQVFFDCQ |
| | | | ATFDRVFPPGPALDSHRLPLRGLREVLRFGRVNDLAALIGQDKITAAEVDRWHTA |
| | | | EQTIAAQQQRREALHEQLSRKKGTDAEVDEYRALVTAIADHRHLTAHVTLSNVVR |
| | | | LHRLMTTVLGRLVDYGGLWERDLTFVTLYEAHRLGGLRNLLSESRVNKFLDGQT |
| | | | PAALSKKNNAEENGMISKVLGDKARRQIRNDFAHFNMLQQGKKTINLTDEINNAR |
| | | | KLMAHDRKLKNAITRSVTTLLQQDGLDIVWTMDASHRLTDAKIDSRNAIHLHKTH |
| | | | NRANIREPLHGKSYCRWVAALFGATSTPSATKKSDKIR |

TABLE 5
Cas1b
Cas13b orthologs

| | |
|---|---|
| Paludibacter | mktsanniyfnginsfkkifdskgaiapiaekscrnfdikaqndvnkeqrihyfavghtf |
| propionicigenes WB4 | kqldtenlfeyvldenlrakrptrfislqqfdkefienikrlisdirninshyihrfdpl |
| (NC_014734.1) | kidavptniidflkesfelaviqiylkekginylqfsenphadqklvaflhdkflpldek |
| >WP_013446107 | ktsmlqnetpqlkeykeyrkyfktlskqaaidqllfaeketdyiwnlfdshpvltisagk |
| (SEQ ID NO: 84) | ylsfysclfllsmflykseangliskikgfkkntteeekskreiftffskrfnsmdidse |
| | enqlvkfrdlilylnhypvawnkdleldssnpamtdklkskiieleinrsfplyegnerf |
| | alfakyqiwgkkhlgksiekeyinasftdeeitaytyetdtcpelkdahkkladlkaakg |
| | lfgkrkeknesdikktetsirelqhepnpikdkliqrieknlltvsygrnqdrfmdfsar |
| | flaeinyfgqdasfkmyhfyatdeqnselekyelpkdkkkydslldhqgklvhfisykeh |
| | lkryeswddafviennaiqlklsfdgventvtiqralliylledalrniqnntaenagkq |
| | llqeyyshnkadlsafkqiltqqdsiepqqktefkkllprrllnnyspainhlqtphssl |
| | plilekallaektycslvvkakaegnyddfikrnkgkqfklqfirkawnlmyfrnsylqn |
| | vqaaghhksfhierdefndfsrymfafeelsqykyylnemfekkgffennefkilfqsgt |
| | slenlyektkqkfeiwlasntaktnkpdnyhlnnyeqqfsnqlffinlshfinylkstgk |
| | lqtdangqiiyealnnvqylipeyyytdkpersesksgnklynklkatkledallyemam |
| | cylkadkqiadkakhpitklltsdvefnitnkegiqlyhllvpfkkidafiglkmhkeqq |
| | dkkhptsflanivnylelvkndkdirktyeafstnpvkrtltyddlakidghlisksikf |
| | tnvtleleryfifkeslivkkgnnidfkyikglrnyynnekkknegirnkafhfgipdsk |
| | sydqlirdaevmfianevkpthatkytdlnkqlhtvcdklmetvhndyfskegdgkkkre |
| | aagqkyfeniisak |
| Prevotella sp. P5-60 | mnipalvenqkkyfgtysvmamlnaqtvldhiqkvadiegeqnennenlwfhpvmshlyn |
| (NZ_JXQJ01000080.1) | akngydkqpektmfiierlqsyfpflkimaenqreysngkykqnrvevnsndifevlkra |
| >WP_044074780.1 | fgvlkmyrdlinhyktyeeklidgcefltsteqpfsgmiskyytvalrntkerygykaed |
| (SEQ ID NO: 85) | lafiqdnrykftkdaygkrksqvntgsflslqdyngdttlddhlsgvgialliclfldkq |
| | yinlflsrlpifssynaqseerriiirsfginsikqpkdrihseksnksvamdmlnevkr |
| | cpdelfttlsaekqsrfriisddhnevlmkrssdifvplllqyidygklfdhirfhvnmg |
| | klryllkadktcidgqtrvrvieqpingfgrleevetmrkqengtfgnsgirirdfenmk |
| | rddanpanypyivetythyilennkvemfisdeenptpllpvieddryvvktipscrmst |
| | leipamafhmflfgsektekliidvhdrykrlfqamqkeevtaeniasfgiaesdlpqki |
| | mdlisgnahgkdvdafirltvddmltdterrikrfkddrksirsadnkmgkrgfkqistg |
| | kladflakdivlfqpsyndgenkitglnyrimqsaiavydsgddyeakqqfklmfekarl |
| | igkgttephpflykvfvrsipanavdfyerylierkfyliglsneikkgnrvdvpfirrd |
| | qnkwktpamktlgriysedlpvelprqmfdneikshlkslpqmegidfnnanytyliaey |
| | mkrvinddfqtfyqwkrnyrymdmlrgeydrkgslqhcftsieereglwkerasrtetyr |
| | klasnkirsnrqmrnasseeietildkrlsncrneyqksekiirryrvqdallfllakkt |
| | lteladfdgerfklkeimpdaekgilseimpmsfifekggkiytitsggmldknygdffv |
| | lasdkrignllelvgsntvskedimeefkkydqcrpeissivfnlekwafdtypelpary |
| | drkekvdfwsildvlsnnkdinneqsyilrkirnafdhnnypdkgiveikalpeiamsik |
| | kafgeyaimk |
| Prevotella sp. P4-76 | mnipalvenqkkyfgtysvmamlnaqtvldhiqkvadiegeqnennenlwfhpvmshlyn |
| (NZ_JXQI01000021.1) | akngydkqpektmfiierlqsyfpflkimaenqreysngkykqnrvevnsndifevlkra |
| >WP_044072147.1 (SEQ | fgvlkmyrdqashyktydeklidgcefltsteqplsgminnyytvalrnmnetygykted |
| ID NO: 86) | lafiqdkrfkfvkdaygkkksqvntgfflslqdyngdtqkklhlsgvgialliclfldkq |
| | yiniflsrlpifssynaqseerriiirsfginsikqpkdrihseksnksvamdmlneikr |
| | cpnelfetlsaekqsrfriisndhnevlmkrssdrfvplllgyidygklfdhirfhvnmg |
| | klryllkadktcidgqtrvrvieqpingfgrleevetmrkqenglfgnsgirirdfenmk |
| | rddanpanypyivdtythyilennkvemfisdeetpapllpvieddryvvktipscrmst |
| | leipamafhmflfgskkteklivdvhnrykrlfkamqkeevtaeniasfgiaesdlpqki |
| | idlisgnahgkdvdafirltvddmladterrikrfkddrksirsadnkmgkrgfkqistg |
| | kladflakdivlfqpsyndgenkitglnyrimqsaiavynsgddyeakqqfklmfekarl |
| | igkgttephpflykvfvrsipanavdfyerylierkfyliglsneikkgnrvdvpfirrd |
| | qnkwktpamktlgriydedlpvelprqmfdneikshlkslpqmegidfnnanytyliaey |
| | mkrvinddfqtfyqwkrnyrymdmlrgeydrkgslqscftsveereglwkerasrtelyr |
| | klasnkirsnrqmrnasseeietildkrlsnsrneyqksekvirryrvqdallfllakkt |
| | lteladfdgerfklkeimpdaekgilseimpmsftfekggkkytitsegmklknygdffv |
| | lasdkrignllelvgsdtvskedimeefkkydqcrpeissivfnlekwafdtypelsarv |
| | dreekvdfksilkillnnkninkeqsdilrkirnafdhnnypdkgvveiralpeiamsik |
| | kafgeyaimk |
| Prevotella sp. P5-125 | mnipalvenqkkyfgtysvmamlnaqtvldhiqkvadiegeqnennenlwfhpvmshlyn |
| (NZ_JXQL01000055.1) | akngydkqpektmfiierlqsyfpflkimaenqreysngkykqnrvevnsndifevlkra |
| >WP_044065294.1 (SEQ | fgvlkmyrdltnhyktyeeklndgcefltsteqplsgminnyytvalrnmnerygykted |
| ID NO: 87) | lafiqdkrfkfvkdaygkkksqvntgfflslqdyngdtqkklhlsgvgialliclfldkq |
| | yiniflsrlpifssynaqseerriiirsfginsiklpkdrihseksnksvamdmlnevkr |
| | cpdelfttlsaekqsffriisddhnevlmkrssdifvplllgyidygklfdhirfhvnmg |
| | klryllkadktcidgqtrvrvieqpingfgrleeaetmrkqenglfgnsgirirdfenmk |
| | rddanpanypyivdtythyilennkvemfindkedsapllpviedchyvvktipscrmst |
| | leipamafhmflfgskkteklivdvhnrykrlfqamqkeevtaeniasfgiaesdlpqki |
| | ldlisgnahgkdvdafirltvddmltdterrikrfkddrksirsadnkmgkrgfkqistg |
| | kladflakdivlfqpsyndgenkitglnyrimqsaiavydsgddyeakqqfklmfekarl |
| | igkgttephpflykvfarsipanavefyerylierkfyltglsneikkgnrvdvpfirrd |
| | qnkwktpamktlgriysedlpvelprqmfdneikshlkslpqmegidfnnanytyliaey |
| | mkrvldddfqtfyqwnrnyrymdmlkgeydrkgslqhcftsveereglwkerasrteryr |
| | kqasnkirsnrqmrnasseeietildkrlsnsrneyqksekvirryrvqdallfllakkt |
| | lteladfdgerfklkeimpdaekgilseimpmsflfekggkkytitsegmklknygdffv |
| | lasdkrignllelvgsdivskedimeefnkydqcrpeissivfnlekwafdtypelsarv |
| | dreekvdfksilkillnnkninkeqsdilrkirnafdhnnypdkgvveikalpeiamsik |
| | kafgeyaimk |
| Prevotella sp. P5-119 | mnipalvenqkkyfgtysvmamlnaqtvldhiqkvadiegeqnennenlwfhpvmshlyn |
| (NZ_JXQK01000043.1) | akngydkqpektmfiierlqsyfpflkimaenqreysngkykqnrvevnsndifevlkra |
| >WP_042518169.1 (SEQ | fgvlkmyrdltnhyktyeeklidgcefltsteqplsgmiskyytvalrntkerygykted |
| ID NO: 88) | lafiqdnikkitkdaygkrksqvntgifislqdyngdtqkklhlsgvgialliclfldkq |
| | yiniflsrlpifssynaqseerriiirsfginsiklpkdrihseksnksvamdmlnevkr |
| | cpdelfttlsaekqslfriisddhnevlmkrstdifvplllqyidygklfdhilfhvnmg |
| | klryllkadktcidgqtrvrvieqplngfgrleeaetmrkqengtfgnsgirirdfenvk |
| | rddanpanypyivdtythyilennkvemfisdkgssapllplieddryvvktipscrmst |
| | leipamafhmflfgskkteklivdvhnrykrlfqamqkeevtaeniasfgiaesdlpqki |
| | ldlisgnahgkdvdafirltvddmltdterrikrfkddrksirsadnkmgkrgfkqistg |
| | kladflakdivlfqpsyndgenkitglnyrimqsaiavydsgddyeakqqfklmfekarl |
| | igkgttephpflylwfarsipanavdfyerylierkfyltglcneikrgnrvdvpfirrd |
| | qnkwktpamktlgriysedlpvelprqmfdneikshlkslpqmegidfnnanvtyliaey |
| | mkrvinddfqtfyqwkrnyhymdmlkgeydrkgslqhcftsveereglwkerasrtelyr |
| | klasnkirsnrqmrnasseeietildkrlsncrneyqksekvirryrvqdallfllakkt |
| | lteladfdgerfklkeimpdaekgilseimpmsflfekggkkytitsegmklknygdffv |
| | lasdkrignllelvgsdivskedimeefnkydqcrpeissivfnlekwafdtypelsarv |
| | dreekvdfksilkillnnkninkeqsdilrkirnafdhnnypdkgiveikalpeiamsik |
| | kafgeyaimk |
| Capnocytophaga | mkniqrlgkgnefspfkkedkfyfggflnlannniedffkeiitrfgivitdenkkpket |
| canimorsus Cc5 | fgekilneifkkdisivdyekwvnifadyfpftkylslyleemqfknrvicfrdvmkell |
| (NC_015846.1) | ktvealrnfythydhepikiedrvlyfldkvlldvsltvknkylktdktkeflnqhigee |
| >WP_013997271.1 | lkelckqrkdylvgkgkridkeseiingiynnafkdfickrekqddkenhnsvekilcnk |
| (SEQ ID NO: 89) | epqnkkqkssatvwelcskssskyteksfpnrendkhclevpisqkgivfllsfflnkge |
| | iyaltsnikgfkakitkeepvtydknsirymathrmfsflaykglkrkirtseinynedg |
| | qasstyeketlmlqmldelnkvpdvvyqnlsedvqktfiedwneylkenngdvgtmeeeq |
| | vihpvirkryedkfnyfairfldefaqfptlrfqvhlgnylcdkrtkqicdttterevkk |
| | kitvfgrlselenkkaiflnereeikgwevfpnpsydfpkenisvnykdfpivgsildre |
| | kqpvsnkigirvkiadelqreidkaikekklrnpknrkanqdekqkerlvneivstnsne |
| | qgepvvfigqptaylsmndihsvlyeflinkisgealetkivekietqikqiigkdattk |
| | ilkpytnansnsinrekllrdleqeqqilktlleeqqqrekdkkdkkskrkhelypsekg |
| | kvavwlandikffmpkafkeqwrgyhhsllqkylayyeqskeelknllpkevfkhfpfkl |
| | kgyfqqqylnqfytdylkrrlsyvnelllniqnflmdkdalkatekecfkffrkqnyiin |
| | piniqiqsilvypiflkrgfldekptmidreldkenkdteladwfmhyknykednyqkfy |
| | ayplekveekeldkrnkqinkqkkndvytlmmveyriqkifgdkfveenplvlkgifqsk |
| | aerqqnnthaattqernlngilnqpkdikiqgkitvkgvklkdignfrkyeidqrvntfl |
| | dyeprkewmaylpndwkekekqgqlppnnvidrqiskyetvrskillkdvqelekiisde |
| | ikeehrhdlkqgkyynfkyyilngllrqlknenvenykvfklntnpekvnitqlkqeatd |
| | leqkafvltyirnkfahnqlpkkefwdycqekygkiekektyaeyfaevfkrekealik |
| Phaeodactylibacter | mtntpkrrtlhrhpsyfgaflniarhnafmimehlstkydmedknfideaqlpnaklfgc |
| xiamenensis | lkkrygkpdvtegvsrdlrryfpflnyplflhlekqqnaeqaatydinpedieftlkgff |
| (NZ_JPOSO1000018.1) | rllnqmmnyshyisntdygkfdldpvqdryeaaifrlldrglchtkffdvfeskhtrhle |
| >WP_044218239.1 | snnseyrprslanspdhentvafvtclflerkyafpflsrldcfrstndaaegdplirka |
| (SEQ ID NO: 90) | shecytmfccrlpqpklessdilldmvnelgrcpsalynllseedqarfhikreeitgfe |
| | edpdeeleqeivlkrhsdrfpyfalryfddteafqtlrfdvylgrwrtkpvykkriygqe |
| | rdrvliqsirtftrlsrllpiyenvkhdavrqneedgklvnpdvtsqfhkswiqiesddr |
| | aflsdriehfsphynfgdqviglkfinpdryaaiqnvfpklpgeekkdkdaklvnetada |
| | iistheirslflyhylskkpisagderrfiqvdtetfikqyidtiklffediksgelqpi |
| | adppnyqkneplpyvrgdkektqeeraqyrerqkeikerrkelntllqnryglsiqyips |
| | rlreyllgyldvpyeklalqklraqrkevkkrikdiekmrtprvgeqatwlaedivfltp |
| | pkmhtperkttkhpqklnndqfrimqsslayfsvnkkaikkffqketgiglsnretshpf |
| | lyridvgrcrgildfytgylkykmdwlddaikkvdnrkhgkkeakkyekylpssiqhktp |
| | leldytrlpvylprglfkkaivkalaahadfqvepeednvifcldqlldgdtqdfynwqr |
| | yyrsalteketdnqlvlahpyaeqilgtiktlegkqknnldgnkakqkikdelidlkrak |
| | rrlldreqylravqaedralwlmiqerqkqkaeheerafdqldlknitkiltesidarlr |
| | ipdtkvditdklplrrygdlrrvakdttlvnlasyyhvaglseipydlvkkeleeydrrr |
| | vaffehvyqfekevydryaaelrnenpkgestyfshweyvavavkhsadthfnelfkekv |
| | mqlrnkfhhnefpyfdwllpevekasaalyadrvfdvaegyyqkmrklmrq |
| Porphyromonas | mntvpasenkgqsrtveddpqyfglylnlarenlieveshvrikfgkkldneeslkqsll |
| gingivalis W83 | cdhllsvdrwtkvyghsrrylpflhyfdpdsqiekdhdsktgvdpdsaqrlirelyslld |
| (NC_002950.2) | flmdfshnrldgttfehlevspdissfitgtyslacgraqsffadfflcpddfvlaknrk |
| >WP_005873511.1 | eqlisvadgkecltvsglafficlfldreqasgmlsrirgfkrtdenwaravhetfcdlc |
| (SEQ ID NO: 91) | irhphdrlessntkeallldmlnelnrcprilydmlpeeeraqflpaldensmnnlsens |
| | lneesrllwdgssdwaealtkrirhqdffpylmlffieemdllkgirfixdlgeieldsy |
| | skkvgmgeydrtitdhalafgklsclfqneeevsrmisgeasypvrfslfapryarydnk |
| | igychtsdpvypksktgekralsnpqsmgfisvhnlrklllmellcegsfsrmqsdflrk |
| | anrildetaegklqfsalfpemrhrfippqnpkskdrrekaettlekykqeikgrkdldn |
| | sqllsafdmnqrqlpsrlldewmnirpashsvklrtyvkqlnedcrlrlrkfrkdgdgka |
| | raiplvgemafflsqdivrmiiseetkklitsayynemqrslaqyageenrrqfraivae |
| | lhlldpssghpflsatmetahrytedfykcylekkrewlaktfyrpeqdentkrrisvff |
| | vpdgearkllpllirrrmkeqndlqdwirnkqahpidlpshlfdskimellkvkdgkkkw |
| | neafkdwwstkypdgmqpfyglrrelnihgksysyipsdgkkfadcythlmektvqdkkr |
| | elrtagkpvppdlaadikrsfhravnerefmlrlvqeddrlmlmainkmmtdreedilpg |
| | lknidsildeenqfslavhakvlekegeggdnslslvpatierkskrkdwskyiryrydr |
| | rvpglmshfpehkatldevktllgeydrcrikifdwafalegaimsdrdlkpylhesssr |
| | egksgehstlvkmlvekkgcltpdesqylilirnkaahnqfpcaaempliyrdvsakvgs |
| | iegssakdlpegsslvdslwkkyemiirkilpildpenrffgkllnnmsqpindl |
| Porphyromonas | mntvpasenkgqsrtveddpqyfglylnlarenlieveshvrikfgkkldneeslkqsll |
| gingivalis F0570 | cdhllsvdrwtkvyghsrrylpflhyfdpdsqiekdhdsktgvdpdsaqrlirelyslld |
| (NZ_KI259168.1) | flrndfshnrldgttfehlevspdissfitgtyslacgraqsffadffkpddfvlaknrk |
| >WP_021665475.1 | eqlisvadgkecltvsglafficlfldreqasgmlsrirgfkrtnenwaravhetfcdlc |
| (SEQ ID NO: 92) | irhphdrlessntkeallldmlnelnrcprilydmlpeeeraqflpaldensmnnlsens |
| | lneesrllwdgssdwaealtkrirhqdrfpylmlrfieemdllkgirfrvdlgeieldsy |
| | skkvgmgeydrtitdhalafgklsclfqneeevsrmisgeasypvrfslfapryarydnk |
| | igychtsdpvypksktgekralsnpqsmgfisvhdlrklllmellcegsfsrmqsgflrk |
| | anrildetaegklqfsalfpemrhrfippqnpkskdrrekaettlekykqeikgrkdkln |
| | sqllsafdmnqrqlpsrlldewmnirpashsvklrtyvkqlnedcrifirkfrkdgdgka |
| | raiplvgemafflsqdivrmiiseetkklitsayynemqrslaqyageenrrqfraivae |
| | lhlldpssghpflsatmetahrytedfykcylekkrewlaktfyrpeqdentkrrisvff |
| | vpdgearkllpllirrrmkeqndlqdwirnkqahpidlpshlfdskimellkvkdgkkkw |
| | neafkdwwstkypdgmqpfyglrrelnihgksysyipsdgkkfadcythlmektvqdkkr |
| | elrtagkpvppdlaadikrsfhravnerefmtrlvqeddrlmlmainkmmtdreedilpg |
| | lknidsildkenqfslavhakvlekegeggdnststvpatieikskrkdwskyirytydr |
| | rvpglmshfpehkatldevktllgeydrcrikifdwafalegaimsdrdlkpythesssr |
| | egksgehstlvkmlvekkgcltpdesqylilirnkaahnqfpcaaempliyrdvsakvgs |
| | iegssakdlpegsslvdslwkkyemiirkilpildhenrffgkllnnmsqpindl |
| Porphyromonas | mntvpasenkgqsrtveddpqyfglylnlarenlieveshvrikfgkkklneestkqsll |
| gingivalis ATCC 33277 | cdhllsvdrwtkvyghsrrylpflhyfdpdsqiekdhdsktgvdpdsaqrlirelystld |
| (NC_010729.1) | flmclfshnrldgttfehlevspdissfitgtyslacgraqsrfavffkpddfvlaknrk |
| >WP_012458151.1 | eqlisvadgkecltvsgfafficlfldreqasgmlsrirgfkrtdenwaravhetfcdlc |
| (SEQ ID NO: 93) | irhphdrlessntkealltdmlnelnrcprilydmlpeeeraqflpaldensmnntsens |
| | ldeesrllwdgssdwaealtkrirhqdrfpylmlrfieemdllkgirfrvdlgeieldsy |
| | skkvgmgeydrtitdhalafgklsclfqneeevsrmisgeasypvrfstfaptyaiydnk |
| | igychtsdpvypksktgekralsnpqsmgfisvhdlrklllmellcegsfsrmqsdflrk |
| | anrildetaegklqfsalfpemrhrfippqnpkskdrrekaettlekykqeikgrkdkln |
| | sqllsafdmdqrqlpsrlldewmnirpashsvklrtyvkqlnedcrlrlrkfrkdgdgka |
| | raiplvgematflsqdivrmiiseetkklitsayynemqrslaqyageenrrqfraivae |
| | lrlldpssghpflsatmetahrytegfykcylekkrewlakifyrpeqdentkrrisvff |
| | vpdgearkllptlirrmkeqndlqdwirnkqahpidlpshlfdskvmelllcvkdgkkkw |
| | neafkdwwstkypdgmqpfyglrrelnihgksysyipsdgkkfadcythlmektvrdkkr |
| | elrtagkpvppdlaadikrsfhravnerefmtrlvqeddrlmlmainkmmtdreedilpg |
| | lknidsildeenqfslavhakvlekegeggdnststvpatieikskrkdwskyirytydr |
| | rvpglmshfpehkatldevktllgeydrcrikifdwafalegaimsdrdtkpythesssr |
| | egksgehstlvkmlvekkgcltpdesqylilirnkaahnqfpcaaempliyrdvsakvgs |
| | iegssakdlpegsslvdslwkkyemiirkilpildpenrffgkllnnmsqpindl |
| Porphyromonas | mntvpasenkgqsrtveddpqyfglylnlarentieveshvrikfgkkklneestkqsll |
| gingivalis F0185 | cdhllsvdrwtkvyghsrrylpflhyfdpdsqiekdhdsktgvdpdsaqrlirelyslld |
| (AWVC01000122.1) | flrndfshnrldgttfehlevspdissfitgtyslacgraqsrfadffkpddfvlaknrk |
| >ERJ81987.1 | eqlisvadgkeclivsglafficlfldreqasgmlsrirgfkrtdenwaravhetfcdlc |
| (SEQ ID NO: 94) | irhphdrlessntkeallldmlnelnrcprilydmlpeeeraqflpaldensmnntsens |
| | lneesrllwdgssdwaealtkrirhqdrfpylmlrfieemdllkgirfivdtgeieldsy |
| | skkvgmgeydrtitdhalafgklsclfqneeevsrmisgeasypvrfstfaptyaiydnk |
| | igychtsdpvypksktgekralsnpqsmgfisvhdlrklllmellcegsfsrmqsgflrk |
| | anrildetaegklqfsalfpemrhrfippqnpkskdrrekaettlekykqeikgrkdkln |
| | sqllsafdmnqrqlpsrlldewmnirpashsvklrtyvkqlnedcrifirkfrkdgdgka |
| | raiplvgematflsqdivrmiiseetkklitsayynemqrslaqyageenrrqfraivae |
| | lhlldpssghpflsatmetahrytedfykcylekkrewlaktfyrpeqdentkrrisvff |
| | vpdgearkllpllirrrmkeqndlqdwirnkqahpidlpshlfdskimellkvkdgkkkw |
| | neafkdwwstkypdgmqpfyglrrelnihgksysyipsdgkkfadcythlmektvqdkkr |
| | elrtagkpvppdlaadikrsfhravnerefmtrlvqeddrlmlmainkmmtdreedilpg |
| | lknidsildeenqfslavhakvlekegeggdnststvpatieikskrkdwskyitytydr |
| | rvpglmshfpehkatldevktllgeydrcrikifdwafalegaimsdrdtkpythesssr |
| | egksgehstlvkmlvekkgcltpdesqylilirnkaahnqfpcaaempliyrdvsakvgs |
| | iegssakdlpegsslvdslwkkyemiirkilpildhenrffgkllnnmsqpindl |
| Porphyromonas | mntvpasenkgqsrtveddpqyfglylnlarentieveshvrikfgkkklneestkqsll |
| gingivalis F0185 | cdhllsvdrwtkvyghsrrylpflhyfdpdsqiekdhdsktgvdpdsaqrlirelyslld |
| (NZ_KI259960.1) | flrndfshnrldgttfehlevspdissfitgtyslacgraqstfadffkpddfvlaknrk |
| >WP_021677657.1 | eqlisvadgkecltvsglafficlfldreqasgmlsrirgfkrtdenwaravhetfcdlc |
| (SEQ ID NO: 95) | irhphdrlessntkealltdmlnelnrcprilydmlpeeeraqflpaldensmnntsens |
| | lneesrllwdgssdwaealtkrirhqdrfpylmltfieemdllkgirfivdlgeieldsy |
| | skkvgmgeydrtitdhalafgklsclfqneeevsrmisgeasypvifstfapryaiydnk |
| | igychtsdpvypksktgekralsnpqsmgfisvhdlrklllmellcegsfsrmqsgflrk |
| | anrildetaegklqfsalfpemrhrfippqnpkskdrrekaettlekykqeikgrkdkln |
| | sqllsafdmnqrqlpsrlldewmnirpashsvklrtyvkqlnedcrlrlrkfrkdgdgka |
| | raiplvgematflsqdivrmiiseetkklitsayynemqrslaqyageerrrqfraivae |
| | lhlldpssghpflsatmetahtytedfykcylekkrewlaktfyrpeqdentkrrisvff |
| | vpdgearkllpllirrrmkeqndlqdwirnkqahpidlpshlfdskimellkvkdgkkkw |
| | neafkdwwstkypdgmqpfyglrrelnihgksysyipsdgkkfadcythlmektvqdkkr |
| | elrtagkpvppdlaadikrsfhravnerefmtrlvqeddrlmlmainkmmtdreedilpg |
| | lknidsildeenqfslavhakvlekegeggdnststvpatieikskrkdwskyirytydr |
| | rvpglmshfpehkatldevktllgeydrcrikifdwafalegaimsdrdlkpylhesssr |
| | egksgehstlvkmlvekkgcltpdesqylilirnkaahnqfpcaaempliyrdvsakvgs |
| | iegssakdlpegsslvdslwkkyemiirkilpildhenrffgkllnnmsqpindl |
| Porphyromonas | mntvpasenkgqsrtveddpqyfglylnlarenlieveshvrikfgkkklneestkqsll |
| gingivalis SJD2 | cdhllsvdrwtkvyghsrrylpflhyfdpdsqiekdhdsktgvdpdsaqrlirelyslld |
| (NZ_KI629875.1) | flrndfshnrldgttfehlevspdissfitgtyslacgraqsrfadffkpddfvlaknrk |
| >WP_023846767.1 | eqlisvadgkecltvsglaffictfldreqasgmlsrirgfkrtdenwaravhelfcdlc |
| (SEQ ID NO: 96) | irhphdrlessntkealltdmlnelnrcprilydmlpeeeraqflpaldensmnntsens |
| | lneesrllwdgssdwaealtkrirhqdrfpylmlrfieemdllkgirfivdlgeieldsy |
| | skkvgmgeydrtitdhalafgklsclfqneeevsrmisgeasypvrfstfaptyaiydnk |
| | igychtsdpvypksktgekralsnprsmgfisvhdlrklllmellcegsfsrmqsdflrk |
| | anrildetaegklqfsalfpemrhrfippqnpkskdrrekaettlekykqeikgrkdkln |
| | sqllsafdmnqrqlpsrlldewmnirpashsvklrtyvkqlnedcrlrlrkfrkdgdgka |
| | raiplvgemalflsqdivrmiiseetkklitsayynemqrslaqyageenrrqfraivae |
| | lhlldpssghpflsatmetahrytedfykcylekkrewlaktfyrpeqdentkrrisvff |
| | vpdgearkllpllirrrmkeqndlqdwirnkqahpidlpshlfdskimellkvkdgkkkw |
| | neafkdwwstkypdgmqpfyglrrelnihgksysyipsdgkkfadcythlmektvqdkkr |
| | elrtagkpvppdlaadikrsfhravnerefmtrlvqeddrlmlmainkmmtdreedilpg |
| | lknidsildeenqfslavhakvlekegeggdnststvpatieikskrkdwskyirytydr |
| | rvpglmshfpehkatldevktllgeydrcrikifdwafalegaimsdrdtkpythesssr |
| | egksgehstlvkmlvekkgcltpdesqylilirnkaahnqfpcaaempliyrdvsakvgs |
| | iegssakdlpegsslvdslwkkyemiirkilpildpenrffgkllnnmsqpindl |
| Porphyromonas | mntvpasenkgqsrtveddpqyfglylnlarenlieveshvrikfgkkklneestkqsll |
| gingivalis F0568 | cdhltsvdrwtkvyghsrrylpflhyfdpdsqiekdhdsktgvdpdsaqrlirelyslld |
| (AWUU01000145.1) | flrndfshnrldgttfehlevspdissfitgtyslacgraqsrfadffkpddfvlaknrk |
| >ERJ65637.1 | eqlisvadgkecltvsglaffictfldreqasgmlsrirgfkrtdenwaravhelfcdlc |
| (SEQ ID NO: 97) | irhphdrlessntkealltdmlnelnrcprilydmlpeeeraqflpaldensmnntsens |
| | lneesrllwdgssdwaealtkrirhqdrfpylmlrfieemdllkgirfivdlgeieldsy |
| | skkvgmgeydrtitdhalafgklsclfqneeevsrmisgeasypvrfstfaptyaiydnk |
| | igychtsdpvypksktgekralsnprsmgfisvhdlrklllmellcegsfsrmqsdflrk |
| | anrildetaegklqfsalfpemrhrfippqnpkskdn-ekaettlekykqeikgrkdkln |
| | sqllsafdmdqrqlpsrlldewmnirpashsvklrtyvkqlnedcrlrlqkfrkdgdgka |
| | raiptvgemalftsqdivrmiiseetkklitsayynemqrslaqyageenrhqfraivae |
| | lrlldpssghpflsatmetahrytedfykcylekkrewlaktlyrpeqdentkrrisvff |
| | vpdgearkllpllirrrmkeqndlqdwirnkqahpidlpshlfdskimellkvkdgkkkw |
| | neafkdwwstkypdgmqpfyglrrelnihgksysyipsdgkkfadcythlmektvqdkkr |
| | elrtagkpvppdlaadikrsfhravnerefmtrlvqeddrlmlmainkmmtdreedilpg |
| | lknidsildeenqfslavhakvlekegeggdnststvpatieikskrkdwskyirytydr |
| | rvpglmshfpehkatldevktllgeydrcrikifdwafalegaimsdrdtkpythesssr |
| | egksgehstlvkmlvekkgcltpdesqylilirnkaahnqfpcaaempliyrdvsakvgs |
| | iegssakdlpegsslvdslwkkyemiirkilpildpenrffgkllnnmsqpindl |
| Porphyromonas | mntvpasenkgqsrtveddpqyfglylnlarenlieveshvrikfgkkklneestkqsll |
| gingivalis W4087 | cdhltsvdrwtkvyghsrrylpflhyfdpdsqiekdhdsktgvdpdsaqrlirelyslld |
| (AWVE01000130.1) | flrndfshnrldgttfehlevspdissfitgtyslacgraqsrfadffkpddfvlaknrk |
| >ERJ87335.1 | eqlisvadgkecltvsglaffictfldreqasgmlsrirgfkrtdenwaravhelfcdlc |
| (SEQ ID NO: 98) | irhphdrlessntkealltdmlnelnrcprilydmlpeeeraqflpaldensmnntsens |
| | lneesrllwdgssdwaealtkrirhqdrfpylmlrfieemdllkgirfivdtgeieldsy |
| | skkvgmgeydrtitdhalafgklsclfqneeevsrmisgeasypvrfstfaptyaiydnk |
| | igychtsdpvypksktgekralsnprsmgfisvhdlrklllmellcegsfsrmqsdflrk |
| | anrildetaegklqfsalfpemrhrfippqnpkskdrrekaettlekykqeikgrkdkln |
| | sqllsafdmdqrqlpsrlldewmnirpashsvklrtyvkqlnedcrlrlqkfrkdgdgka |
| | raiptvgemalftsqdivrmiiseetkklitsayynemqrslaqyageenrhqfraivae |
| | lrlldpssghpflsatmetahrytedfykcylekkrewlaktlyrpeqdentkrrisvff |
| | vpdgearkllptlim-mkeqndlqdwirnkqahpidlpshlfdskvmelllcvkdgkkkw |
| | neafkdwwstkypdgmqpfyglrrelnihgksysyipsdgkkfadcythlmektvrdkkr |
| | elrtagkpvppdlaayikrsfhravnerefmtrlvqeddrlmlmainkimtdreedilpg |
| | lknidsildkenqfslavhakvlekegeggdnststvpatieikskrkdwskyirytydr |
| | rvpglmshfpehkatldevktllgeydrcrikifdwafalegaimsdrdlkpylhesssr |
| | egksgehstlykmlyekkgcltpdesqylilirnkaahnqfpcaaeipliyrdvsakvgs |
| | iegssakdlpegsslvdslwkkyemiirkilpildpenrffgklinnmsqpindl |
| Porphyromonas | mntvpasenkgqsrtveddpqyfglylnlarenlieveshyrikfgkkklneeslkqsll |
| gingivalis W4087 | cdhllsydrwtkvyghsrrylpflhyfdpdsqiekdhdsktgvdpdsaqrlirelyslld |
| (NZ_KI260263.1) | flrndfshnrldgttfehlevspdissfitgtyslacgraqsrfadffkpddfvlaknrk |
| >WP_021680012.1 | eqlisvadgkecltvsglafficlfldreqasgmlsrirgfkrtdenwaravhetfedlc |
| (SEQ ID NO: 99) | irhphdrlessntkeallldmlnelnrcprilydmlpeeeraqflpaldensmnnlsens |
| | lneesrllwdgssdwaealtkrirhqdrfpylmlifieemdllkgirfrvdlgeieldsy |
| | skkvgrngeydrtitdhalafgklsdfqneeevsrmisgeasypyrfslfaptyaiydnk |
| | igychtsdpyypksktgekralsnprsmgfisvhdlrkillmellcegsfsrmqsdflrk |
| | am-ildetaegklqfsalfpemrhrfippqnpkskdrrekaettlekykqeikgrkdkln |
| | sqllsafdmdqrqlpsrlldewmnirpashsvklrtyvkqlnedcrlrlqkfrkdgdgka |
| | raiplygematilsqdivrmiiseetkklitsayynemqrslaqyageenrhqfraivae |
| | lrlldpssghpflsatmetahrytedfykcylekkrewlaktfyrpeqdentkrrisvff |
| | vpdgearkllpllirrrmkeqndlqdwirnkqahpidlpshlfdskvmellkvkdgkkkw |
| | neafkdwwstkypdgmqpfyglrrelnihgksysyipsdgkkfadcythlmektvrdkkr |
| | elrtagkpyppdlaayikrsfhravnerefmlrlvqeddrlmlmainkimtdreedilpg |
| | lknidsildkenqfslavhakvlekegeggdnslslypatieikskrkdwskyirytydr |
| | rvpglmshfpehkatldevktllgeydrcrikifdwafalegaimsdrdlkpylhesssr |
| | egksgehstlykmlyekkgcltpdesqylilirnkaahnqfpcaaeipliyrdvsakvgs |
| | iegssakdlpegsslvdslwkkyemiirkilpildpenrffgkllnnmsqpindl |
| Porphyromonas | mntvpasenkgqsrtveddpqyfglylnlarenlieveshyrikfgkkklneeslkqsll |
| gingivalis F0568 | cdhllsydrwtkvyghsrrylpflhyfdpdsqiekdhdsktgvdpdsaqrlirelyslld |
| (NZ_KI258981.1) | flrndfshnrldgttfehlevspdissfitgtyslacgraqsrfadffkpddfvlaknrk |
| >WP_021663197.1 | eqlisvadgkecltvsglafficlfldreqasgmlsrirgfkrtdenwaravhetfedlc |
| (SEQ ID NO: 100) | irhphdrlessntkeallldmlnelnrcprilydmlpeeeraqflpaldensmnnlsens |
| | lneesrllwdgssdwaealtkrirhqdrfpylmlrfieemdllkgirfrvdlgeieldsy |
| | skkvgingeydrtitdhalafgklsdfqneeevsrmisgeasypyrfslfaptyaiydnk |
| | igychtsdpyypksktgekralsnprsmgfisvhdlrkillmellcegsfsrmqsdflrk |
| | anrildetaegklqfsalfpemrhrfippqnpkskdrrekaettlekykqeikgrkdkln |
| | sqllsafdmdqrqlpsrlldewmnirpashsvklrtyvkqlnedcrlrlqkfrkdgdgka |
| | raiplygematilsqdivrmiiseetkklitsayynemqrslaqyageenrhqfraivae |
| | lrlldpssghpflsatmetahrytedfykcylekkrewlaktfyrpeqdentkrrisvff |
| | vpdgearkllpllirrrmkeqndlqdwirnkqahpidlpshlfdskimellkvkdgkkkw |
| | neafkdwwstkypdgmqpfyglrrelnihgksysyipsdgkkfadcythlmektvqdkkr |
| | elrtagkpyppdlaadikrsfhravnerefmlrlvqeddrlmlmainkmmtdreedilpg |
| | lknidsildeenqfslavhakvlekegeggdnslslypatieikskrkdwskyirytydr |
| | rvpglmshfpehkatldevktllgeydrcrikifdwafalegaimsdrdlkpylhesssr |
| | egksgehstlykmlyekkgcltpdesqylilirnkaahnqfpcaaempliyrdvsakvgs |
| | iegssakdlpegsslvdslwkkyemiirkilpildpenrffgkllnnmsqpindl |
| Porphyromonas | mntvpasenkgqsrtveddpqyfglylnlarenlieveshyrikfgkkklneeslkqsll |
| gingivalis | cdhllsydrwtkvyghsrrylpflhyfdpdsqiekdhdsktgvdpdsaqrlirelyslld |
| (NZ_LOEL01000010.1) | flmdfshnrldgttfehlevspdissfitgtyslacgraqsrfadffkpcldfvlaknrk |
| >WP_061156637.1 | eqlisvadgkecltvsglafficlfldreqasgmlsrirgfkrtdenwaravhetfedlc |
| (SEQ ID NO: 101) | irhphdrlessntkeallldmlnelnrcprilydmlpeeeraqflpaldensmnnlsens |
| | lneesrllwdgssdwaealtkrirhqdrfpylmlrfieemdllkgirfrvdlgeieldsy |
| | skkvgingeydrtitdhalafgklsdfqneeevsrmisgeasypyrfslfaptyaiydnk |
| | igychtsdpyypksktgekralsnpqsmgfisvhdlrkillmellcegsfsrmqsgflrk |
| | anrildetaegklqfsalfpemrhrfippqnpkskdn-ekaettlekykqeikgrkdkln |
| | sqllsafdmnqrqlpsrlldewmnirpashsvklrtyvkqlnedcrifirkfrkdgdgka |
| | raiplvgematflsqdivrmiiseetkklitsayynemqrslaqyageenrrqfraivae |
| | lhlldpssghpflsatmetahrytedfykcylekkrewlaktfyrpeqdentkrrisvff |
| | vpdgearkllpllirrrmkeqndlqdwirnkqahpidlpshlfdskimellkvkdgkkkw |
| | neafkdwwstkypdgmqpfyglrrelnihgksysyipsdgkkfadcythlmektvqdkkr |
| | elrtagkpyppdlaadikrsfhravnerefmlrlyqeddrlmlmainkmmtdreedilpg |
| | lknidsildkenqfslavhakvlekegeggdnslslypatieikskrkdwskyirytydr |
| | rvpglmshfpehkatldevktllgeydrcrikifdwafalegaimsdrdlkpylhesssr |
| | egksgehstlykmlyekkgcltpdesqylilirnkaahnqfpcaaempliyrdvsakvgs |
| | iegssakdlpegsslvdslwkkyemiirkilpildpenrffgkllnnmsqpindl |
| Porphyromonas gulae | mntvpatenkgqsrtveddpqyfglylnlarenlieveshvrikfgkkklneeslkqsll |
| (NZ_JRAQ01000019.1) | cdhllsidrwtkvyghsrrylpflhcfdpdsgiekdhdsktgvdpdsaqrlirelyslld |
| >WP_039445055.1 | flmclfshnrldgttfehlkvspdissfitgaylfaceraqsrfadffkpddfllaknrk |
| (SEQ ID NO: 102) | eqlisvadgkecltvsgfafficlfldreqasgmlsrirgfkrtdenwaravhetfcdlc |
| | irhphdrlessntkeallldmlnelnrcprilydmlpeeeraqflpaldensmnnlsens |
| | lneesrllwdgssdwaealtkrirhqdrfpylmlrfieemdllkgirfrvdlgeieldsy |
| | skkvgmgeydrtitdhalafgklsclfqneeevsrmisgeasypvrfslfaplyaiydnk |
| | igychtsdpvypksktgekralsnpqsmgfisvhdlrklllmellcegsfsrmqsdflrk |
| | anrildetaegklqfsalfpemrhrfippqnpkskdrrekaettlekykqeikgrkdkln |
| | sqllsafdmnqrqlpsrlldewmnirpashsvklrtyvkqlnedcrifirkfrkdgdgka |
| | raiplvgematflsqdivrmiiseetkklitsayynemqrslaqyageenrrqfraivae |
| | lhlldpssghpflsatmetahrytedfykcylekkrewlaktfyrpeqdentkrrisvff |
| | vpdgearkllpllirrrmkeqndlqdwirnkqahpidlpshlfdskimellkykdgkkkw |
| | neafkdwwstkypdgmqpfyglrrelnihgksysyipsdgkkfadcythlmektvrdkkr |
| | elrtagkpvppdlaayikrsfhravnerefmlrlvqeddrlmlmainkmmtdreedilpg |
| | lknidsildeenqfslavhakvlekegeggdnslslvpatieikskrkdwskyilyiydr |
| | rvpglmshfpehkatldevktllgeydrcrikifdwafalegaimsdrdlkpylhesssr |
| | egksgehstlvkmlvekkgcltpdesqylilirnkaahnqfpcaaempliyrdvsakvgs |
| | iegssakdlpegsslvdslwkkyemiirkilpildhenrffgkllnnmsqpindl |
| Bacteroides pyogenes | mesiknsqkstgktlqkdppyfglylnmallnvrkvenhirkwlgdvallpeksgfhsll |
| F0041 (KE993153.1) | ttdnlssakwtrfyyksrkflpflemfdsdkksyenrrettecldtidrqkissllkevy |
| >ERI81700.1 | gklqdirnafshyhiddqsvkhtaliissemhrfienaysfalqktrarftgvfvetdfl |
| (SEQ ID NO: 103) | qaeekgdnkkffaiggnegiklkdnalifliclfldreeafkflsratgfkstkekgfla |
| | vrelfcalccrqpherllsvnpreallmdmlnelnrcpdilfemldekdqksflpllgee |
| | eqahilenslndelceaiddpfemiaslskrvryknrfpylmlryieeknllpfirfrid |
| | lgclelasypkkmgeennyersvtdhamafgrltdfhnedavlqqitkgitdevrfslya |
| | pryaiynnkigfvrtggsdkisfptlkkkggeghcvaytlqntksfgfisiydlrkilll |
| | sfldkdkaknivsglleqcekhwkdlsenlfdairtelqkefpvplirytlprskggklv |
| | sskladkqekyeseferrkeklteilsekdfdlsqiprrmidewlnvlptsrekklkgyv |
| | etlkldcrerlrvfekrekgehpvpprigematdlakdiirmvidqgvkqritsayysei |
| | qrclaqyagddnrrhldsiirelrlkdtknghpflgkvlrpglghteklyqryfeekkew |
| | leatfypaaspkrvprfvnpptgkqkelpliirnlmkerpewrdwkqrknshpidlpsql |
| | feneicrllkdkigkepsgklkwnemfklywdkefpngmqrfyrckrrvevfdkvveyey |
| | seeggnykkyyealidevvrqkissskeksklqvedltlsvrrvfkrainekeyqlrllc |
| | eddrllfmavrdlydwkeaqldldkidnmlgepvsysqviqleggqpdavikaecklkdv |
| | sklmrycydgrvlglmpyfanheatqeqvemelrhyedhrrrvfnwvfaleksvlknekl |
| | rrfyeesqggcehrrcidalrkaslvseeeyeflvhitnksahnqfpdleigklppnvts |
| | gfceciwskykaiicriipfidperrffgklleqk |
| Bacteroides pyogenes | mesiknsqkstgktlqkdppyfglylnmallnvrkvenhirkwlgdvallpeksgfhsll |
| JCM 10003 | ttdnlssakwtrfyyksrkflpflemfdsdkksyenrretaecldtidrqkissllkevy |
| (NZ_BAIU01000001.1) | gklqdirnafshyhiddqsvkhtaliissemhrfienaysfalqktrarftgvfvetdfl |
| >WP_034542281.1 | qaeekgdnkkffaiggnegiklkdnalifliclfldreeafkflsratgfkstkekgfla |
| (SEQ ID NO: 104) | vretfcalccrqpherllsvnpreallmdmlnelnrcpdilfemldekdqksflpllgee |
| | eqahilenslndelceaiddpfemiaslskrvryknrfpylmlryieeknllpfirfrid |
| | lgclelasypkkmgeennyersvtdhamafgrltdfhnedavlqqitkgitdevrfslya |
| | plyaiynnkigfvrtsgsdkisfpfikkkggeghcvaytlqntksfgfisiydlrkilll |
| | sfldkdkaknivsglleqcekhwkdlsenlfdairtelqkefpvplirytlprskggklv |
| | sskladkqekyeseferrkeklteilsekdfdlsqiprrmidewlnvlptsrekklkgyv |
| | etlkldcrerlrvfekrekgehplpprigematdlakdiirmvidqgvkqritsayysei |
| | qrclaqyagddnrrhldsiirelrlkdtknghpflgkvlrpglghteklyqryfeekkew |
| | leatfypaaspkrvprfvnpptgkqkelpliirnlmkerpewrdwkqrknshpidlpsql |
| | feneicrllkdkigkepsgklkwnemfklywdkefpngmqrfyrckrrvevfdkvveyey |
| | seeggnykkyyealidevvrqkissskeksklqvedltlsvrrvfkrainekeyqlrllc |
| | eddrllfmavrdlydwkeaqldldkidnmlgepvsysqviqleggqpdavikaecklkdv |
| | sklmrycydgrvlglmpyfanheatqeqvemelrhyedhrrrvfnwvfaleksvlknekl |
| | rrfyeesqggcehrrcidalrkaslvseeeyeflvhirnksahnqfpdleigklppnvts |
| | gfceciwskykaiicriipfidperrffgklleqk |
| Alistipes sp. ZOR0009 | msneigafrehqfayapgnekqeeatfatyfnlalsnvegmmfgevesnpdkieksldtl |
| (NZ_JTLD01000029.1) | ppailrqiasfiwlskedhpdkaysteevkvivtdlvrrlcfyrnyfshcfyldtqyfys |
| >WP_047447901.1 | delvdttaigeklpynfhhfitnrlfryslpeitlfrwnegerkyeilrdgliffcclfl |
| (SEQ ID NO: 105) | krgqaerflneliffkrtdeegrikrtiftkyctreshkhigieeqdflifqdiigdlnr |
| | vpkvcdgvvdlskeneryiknretsnesdenkaryrllirekdkfpyylmryivdfgvlp |
| | citfkqndystkegrgqfhyqdaavaqeercynfvvrngnvyysympqaqnvvriselqg |
| | tisveelrnmvyasingkdvnksveqylyhlhllyekiltisgqtikegrvdvedyrpll |
| | dklllrpasngeelrrelrkllpkrvcdllsnrfdcsegvsavekrlkaillrheqllls |
| | qnpalhidkiksvidylylffsddekfrqqptekahrglkdeefqmyhylvgdydshpla |
| | lwkeleasgrlkpemrkltsatslhglymlclkgtvewcrkqlmsigkgtakveaiadrv |
| | glklydlclkeytpeqlerevklwmhgyaaaatpkpkaqaaipskltelifysflgkrem |
| | sfaafirqdkkaqklwlrnfytveniktlqkrqaaadaackklynlvgevervhtndkvl |
| | vlvaqryrerllnvgskcavtldnperqqkladvyevqnawlsilfddklftlthvnlsn |
| | lrkaynliprkhilafkeyldnrvkqklceecrnvrrkedlctccsprysnltswlkenh |
| | sessiereaatmmlldverkllsfllderrkaiieygkfipfsalvkecrladaglcgir |
| | ndvlhdnvisyadaigklsayfpkeaseaveyirrtkevreqrreelmanssq |
| Flavobacterium | menlnkildkeneiciskifntkgiaapitekaldnikskqkndlnkearlhyfsighsf |
| branchiophilum FL-15 | kqidtkkvfdyvlieelkdekplkfitlqkdfftkefsiklqklinsirninnhyvhnfn |
| (NC_016001.1) | dinlnkidsnvfhflkesfelaiiekyykvnkkypldneivlflkelfikdentallnyf |
| >WP_014084666.1 | tnlskdealeyillftitenkiwninnehnilniekgkyltfeamlflitiflykneanh |
| (SEQ ID NO: 106) | llpklydfknnkskqelftffskkftsqdidaeeghlikfrdmiqylnhyptawnndlkl |
| | esenknkimttklidsiiefelnsnypsfatdiqfkkeakaflfasnlckmqtsfsnksy |
| | neeirhnphikqyrdeiasaltpisfnvkedldkifvkkhvleeyfpnsigyekfleynd |
| | ftekekedfglklysnpktnklieridnhklvkshgrnqdrfmdfsmrflaennyfgkda |
| | ffkcykfydtqeqdeflqsnennddvkihkgkvttyikyeehlknysywdcpfveennsm |
| | svkisigseekilkiqrnlmiyflenalynenvenqgyklynnyyrelkkdveesiasld |
| | liksnpdfkskykkilpkrllhnyapakqdkapenafetllkkadfreeqykkllkkaeh |
| | eknkedfvkrnkgkqfklhfirkacqmmyfkekyntlkegnaafekkdpviekrknkehe |
| | fghhknlnitreefndyckwmfafngndsykkylrdlfsekhffdnqeyknlfessvnle |
| | afyaktkelfkkwietnkptnnenrytlenyknlilqkqvfinvyhfskylidknllnse |
| | nnviqykslenveylisdfyfqsklsidqhktcgklfnklksnkledcllyeiaynyidk |
| | knvhkidiqkiltskiiltindantpykisvpfnklerytemiaiknqnnlkarflidlp |
| | lylsknkikkgkdsagyeiiikndleiedintinnkiindsvkftevlmelekyfilkdk |
| | cilsknyidnseipslkqfskvwikeneneiinyrniachfhlpllelfdnlllnveqkf |
| | ikeelqnvstindlskpqeylillfikfkhnnfylnlfnknesktikndkevkknrvlqk |
| | finqvilkkk |
| Prevotella sp. MA2016 | mskeckkqrqekkrrlqkanfsisltgkhvfgayfnmartnfvktinyilpiagvrgnys |
| (NZ_JHUW01000010.1) | enqinkmlhalfliqagrneeltteqkqwekklrinpeqqtkfqkllfkhfpvlgpmmad |
| >WP_036929175.1 | vadhkaylnkkkstvqtedetfamlkgvsladcldiiclmadtltecrnfythkdpynkp |
| (SEQ ID NO: 107) | sqladqylhqemiakkldkvvvasrrilkdreglsvnevefltgidhlhqevlkdefgna |
| | kvkdgkvmktfveyddfyfkisgkrlvngytyttkddkpvnvntmlpalsdfgllyfcvl |
| | flskpyaklfidevrlfeyspfddkenmimsemlsiyrirtprlhkidshdskatlamdi |
| | fgelrrcpmelynlldknagqpffhdevkhpnshtpdvskrlryddrfptlalryidete |
| | lfkrirfqlqlgsfrykfydkencidgrvrvrriqkeingygrmqevadkrmdkwgdliq |
| | kreersvkleheelyinldqfledtadstpyvtdrrpaynihanriglywedsqnpkqyk |
| | vfdengmyipelvvtedkkapikmpaprcalsvydlpamlfyeylreqqdnefpsaeqvi |
| | ieyeddyrkffkavaegklkpfkrpkefrdfikkeypklrmadipkklqlflcshglcyn |
| | nkpetvyerldrltlqhleerelhiqnrlehyqkdrdmignkdnqygkksfsdvrhgala |
| | lylaqsmmewqptklkdkekghdkltglnynvltaylatyghpqvpeegftprtleqvli |
| | nahliggsnphpfinkvlalgnmieelylhyleeellchirsriqslssnpsdkalsalp |
| | fihhdrmryhertseemmalaaryttiqlpdglftpyileilqkhytensdlqnalsqdv |
| | pvklnptcnaaylitlfyqtvlkdnaqpfylsdktytrnkdgekaesfsfkrayelfsvl |
| | nnnkkdtfpfemiplfltsdeiqerlsaklldgdgnpvpevgekgkpatdsqgntiwkrr |
| | iysevddyaekltdrdmkisfkgeweklprwkqdkiikrrdetrrqmrdellqrmpryir |
| | dikdnertlrryktqdmvlfllaekmftniiseqssefnwkqmrlskvcneaflrqtlif |
| | rvpvtvgettiyvegenmslknygefyrfltddrlmsllnnivetlkpnengdlvirhtd |
| | lmselaaydqyrstifmliqsienliitnnavlddpdadgfwvredlpkrnnfaslleli |
| | nqlnnveltdderkllvairnafshnsynidfslikdvkhlpevakgilqhlqsmlgvei |
| | tk |
| Myroides odoratimimus | mkdilttdttekqnrfyshkiadkyffggyfnlasnniyevfeevnkrnlfgklakrdng |
| CCUG 10230 | nlknyiihvfkdelsisdfekrvaifasyfpiletvdkksikernrtidltlsqrirqfr |
| (AGEC02000017.1) | emlislvtavdqlrnfythyhhsdivienkvldflnssfvstalhvkdkylktdktkefl |
| >EHO06562.1 | ketiaaeldilieaykkkqiekkntrfkankredilnaiyneafwsfindkdkdkdketv |
| (SEQ ID NO: 108) | vakgadayfeknhhksndpdfalnisekgivyllsffltnkemdslkanltgfkgkvdre |
| | sgnsikymatqriysfhtyrglkqkirtseegvketllmqmidelskvpnvvyqhlsttq |
| | qnsfiedwneyykdyeddvetddlsrvihpvirkryedrfnyfairfldeffdfptlrfq |
| | vhlgdyvhdrrtkqlgkvesdriikekvtvfarlkdinsakasyfhsleeqdkeeldnkw |
| | tlfpnpsydfpkehtlqhqgeqknagkigiyvklrdtqykekaaleearkslnpkersat |
| | kaskydiitqlleandnyksekplvftgqpiaylsmndihsmlfslltdnaelkktpeev |
| | eaklidqigkqineilskdtdtkilkkykdndlketdtdkitrdlardkeeieklileqk |
| | qraddynytsstkfnidksrkrkhllfnaekgkigvwlandikrfmfkeskskwkgyqht |
| | elqklfayfdtsksdlelilsnmvmvkdypielidlvkksrtlvdflnkylearleyien |
| | vitrvknsigtpqfktvrkecftflkksnytvvsldkqverilsmplfiergfmddkptm |
| | legksykqhkekfadwfvhykensnyqnfydtevyeittedkrekakvtkkikqqqkndv |
| | ftlmmvnymleevlklssndrlslnelyqtkeerivnkqvakdtqernknyiwnkvvdlq |
| | lcdglvhidnvklkdignfrkyendsrvkefltyqsdivwsaylsnevdsnklyvierql |
| | dnyesirskellkevqeiecsvynqvankeslkqsgnenfkqyvlqgllpigmdvremli |
| | lstdvkfkkeeiiqlgqageveqdlysliyirnkfahnqlpikeffdfcennyrsisdne |
| | yyaeyymeifrsikekyan |
| Myroides odoratimimus | mkdilttdttekqnrfyshkiadkyffggyfnlasnniyevfeevnkrnffgklakrdng |
| CCUG 3837 | nlknyiihvfkdelsisdfekrvaifasyfpiletvdkksikernrtidlfisqrirqfr |
| (AGZK01000016.1) | emlislvtavdqlrnfythyhhseivienkvldflnsslvstalhvkdkylktdktkefl |
| >EKB06014.1 | ketiaaeldilieaykkkqiekkntrfkankredilnaiyneafwsfindkdkdketvva |
| (SEQ ID NO: 109) | kgadayfeknhhksndpdfalnisekgivyllsffltnkemdslkanltgfkgkvdresg |
| | nsikymatqriysfhtyrglkqkirtseegvketllmqmidelskvpnnvyqhlsttqqn |
| | sfiedwneyykdyeddvetddlsrvdhpvirkryedrfnyfaiffldeffdfptlrfqvh |
| | lgdyvhdrrtkqlgkvesdriikekvtvfarlkdinsakasyfhsleeqdkeeldnkwtl |
| | fpnpsydfpkehtlqhqgeqknagkigiyvklrdtqykekaaleearkslnpkersatka |
| | skydritqiieandnyksekplvftgqpiaylsmndihsmlfslltdnaelkktpeevea |
| | klidqigkqineilskdtdtkilkkykdndlketdtdkitrdlardkeeieklileqkqr |
| | addynytsstkfnidksrkrkhllfnaekgkigvwlandikrfmfkeskskwkgyqhtel |
| | qklfayfdtsksdlelilsdmvmvkdypielidlyrksrtivdflnkylearlgyienvi |
| | trvkinsigtpqatvrkecfaflkesnytvasldkqierilsmplfiergfmdskptmle |
| | gksyqqhkedfadwfvhykensnyqnfydtevyeiitedkreqakvtkkikqqqkndvft |
| | lmmvnymleevlklpsndrlslnelyqtkeerivnkqvakdtqernknyiwnkvvdlqlc |
| | eglvridkvklkdignfrkyendsrvlefltyqsdivwsgylsnevdsnklyvierqldn |
| | yesirskellkevqeiecivynqvankeslkqsgnenfkqyvlqgllprgtdvremlils |
| | tdvkfkkeeimqlgqvreveqdlysliyirnkfahnqlpikeffdfcennyrpisdneyy |
| | aeyymeifrsikekyas |
| Myroides odoratimimus | mkdilttdttekqnrfyshkiadkyffggyfnlasnniyevfeevnkrnffgklakrdng |
| CCUG 3837 | nlknyiihvfkdelsisdfekrvaifasyfpiletvdkksikernrtidlfisqrirqfr |
| (NZ_JH815535.1) | emlislvtavdqlrnfythyhhseivienkvldflnsslvstalhvkdkylktdktkefl |
| >WP_006265509.1 | ketiaaeldilieaykkkqiekkntrfkankredilnaiyneafwsfindkdkdketvva |
| (SEQ ID NO: 110) | kgadayfeknhhksndpdfalnisekgivyllsffltnkemdslkanltgfkgkvdresg |
| | nsikymatqriysfhtyrglkqkirtseegvketllmqmidelskvpnvvyqhlsttqqn |
| | sfiedwneyykdyeddvetddlsrvihpvirkryedrfnyfaiffldeffdfptlrfqvh |
| | lgdyvhdrrtkqlgkvesdriikekvtvfarlkdinsakasyfhsleeqdkeeldnkwtl |
| | fpnpsydfpkehtlqhqgeqknagkigiyvklrdtqykekaaleearkslnpkersatka |
| | skydritqiieandnyksekplvftgqpiaylsmndihsmlfslltdnaelkktpeevea |
| | klidqigkqineilskdtdtkilkkykdndlketdtdkitrdlardkeeieklileqkqr |
| | addynytsstkfnidksrkrkhllfnaekgkigvwlandikrfmfkeskskwkgyqhtel |
| | qklfayfdtsksdlelilsdmvmvkdypielidlyrksrtivdflnkylearlgyienvi |
| | trvknsigtpqfktvrkecfaflkesnytvasldkqierilsmplfiergfmdskptmle |
| | gksyqqhkedfadwfvhykensnyqnfydtevyeritedkreqakytkkikqqqkndvft |
| | lmmvnymleevlklpsndrlslnelyqtkeerivnkqvakdtqernknyiwnkvvdlqlc |
| | eglvridkvklkdignfrkyendsrvkefltyqsdivwsgylsnevdsnklyvierqldn |
| | yesirskellkevqeiecivynqvankeslkqsgnenfkqyvlqgllprgtdvremlils |
| | tdvkfkkeeimqlgqvreveqdlysliyirnkfahnqlpikeffdfcermyrpisdneyy |
| | aeyymeifrsikekyas |
| Myroides odoratimimus | mkdilttdttekqnrfyshkiadkyffggyfnlasnniyevfeevnkrnffgklakrdng |
| CCUG 12901 | nlknyiihvfkdelsisdfekrvaifasyfpiletvdkksikernrtidlfisqrirqfr |
| (NZ_JH590834.1) | emlislvtavdqlrnfythyhhseivienkvldflnsslvstalhvkdkylktdktkefl |
| >WP_006261414.1 | ketiaaeldilieaykkkqiekkntrfkankredilnaiyneafwsfindkdkdketvva |
| (SEQ ID NO: 111) | kgadayfeknhhksndpdfalnisekgivyllsffltnkemdslkanltgfkgkvdresg |
| | nsikymatqriysfhtyrglkqkirtseegvketllmqmidelskvpnvvyqhlsttqqn |
| | sfiedwneyykdyeddvetddlsrvihpvirklyedrfnyfairfldeffdfptlrfqvh |
| | lgdyvhdrrtkqlgkvesdriikekvtvfarlkdinsakanyfhsleeqdkeeldnkwtl |
| | fpnpsydfpkehtlqhqgeqknagkigiyvklrdtqykekaaleearkslnpkersatka |
| | skydritqiieandnyksekplvftgqpiaylsmndihsmlfslltdnaelkktpeevea |
| | klidqigkqineilskdtdtkilkkykdndlketdtdkitrdlardkeeieklileqkqr |
| | addynytsstkfnidksrkrkhllfnaekgkigvwlandikrfmteefkskwkgyqhtel |
| | qklfayydtsksdldlilsdmvmvkdypielialvkksrtivdflnkylearlgymenvi |
| | trvlnsigtpqfktyrkecftflkksnytvvsldkqverilsmplfiergfmddkptmle |
| | gksyqqhkekfadwfvhykensnyqnfydtevyeittedkrekakytkkikqqqkndvft |
| | lmmvnymleevlklssndrlslnelyqtkeerivnkqvakdtqernknyiwnkvvdlqlc |
| | eglvridkvklkdignfrkyendsrvkefltyqsdivwsaylsnevdsnklyvierqldn |
| | yesirskellkevqeiecsvynqvankeslkqsgnenfkqyvlqglvpigmdvremlils |
| | tdvkfikeeiiqlgqageveqdlysliyirnkfahnqlpikeffdfcennyrsisdneyy |
| | aeyymeifrsikekyts |
| Myroides odoratimimus | mkdilttdttekqnrfyshkiadkyffggyfnlasnniyevfeevnkrntfgklakrdng |
| CCUG 12901 | nlknyiihvfkdelsisdfekrvaifasyfpiletvdkksikernrtidltlsqrirqfr |
| (AGED01000033.1) | emlislvtavdqlrnfythyhhseivienkvldflnsslvstalhvkdkylktdktkefl |
| >EHO08761.1 | ketiaaeldilieaykkkqiekkntrfkankredilnaiyneafwsfindkdkdketvva |
| (SEQ ID NO: 112) | kgadayfeknhhksndpdfalnisekgivyllsfilinkemdslkanligfkgkydresg |
| | nsikymatqriysfhtyrglkqkirtseegvketllmqmidelskvpnvvyqhlsttqqn |
| | sfiedwneyykdyeddvetddlsrvihpvirkryedrfnyfairfldeffdfptlrfqvh |
| | lgdyvhdrrtkqlgkvesdriikekvtvfarlkdinsakanyfhsleeqdkeeldnkwtl |
| | fpnpsydfpkehtlqhqgeqknagkigiyvklrdtqykekaaleearkslnpkersatka |
| | skydiitqiieandnyksekplvftgqpiaylsmndihsmlfsllidnaelkktpeevea |
| | klidqigkqineilskdtdtkilkkykdndlketdtdkitrdlardkeeieklileqkqr |
| | addynytsstkfnidksrkrkhllfnaekgkigvwlandikrfmteefkskwkgyqhtel |
| | qklfayydtsksdldlilsdmvmvkdypielialvkksrtivdflnkylearlgymenvi |
| | trvknsigtpqfktvrkecftflkksnytvvsldkqverilsmplfiergfmddkptmle |
| | gksyqqhkekfadwfvhykensnyqnfydtevyeittedkrekakytkkikqqqkndvft |
| | lmmvnymleevlklssndrlslnelyqtkeerivnkqvakdtqernknyiwnkvvdlqlc |
| | eglvridkvklkdignfrkyendsrvkefltyqsdivwsaylsnevdsnklyvierqldn |
| | yesirskellkevqeiecsvynqvankeslkqsgnenfkqyvlqglvpigmdvremlils |
| | tdvkfikeeiiqlgqageveqdlysliyirnkfahnqlpikeffdfcennyrsisdneyy |
| | aeyymeifrsikekyts |
| Myroides odoratimimus | mkdilttdttekqnrfyshkiadkyffggyfnlasnniyevfeevnkrntfgklakrdng |
| (NZ_CP013690.1) | nlknyiihvfkdelsisdfekrvaifasyfpiletvdkksikernrtidltlsqrirqfr |
| >WP_058700060.1 | emlislvtavdqlrnfythyhhsdivienkvldflnssfvstalhvkdkylktdktkefl |
| (SEQ ID NO: 113) | ketiaaeldilieaykkkqiekkntrfkankredilnaiyneafwsfindkdkdkdketv |
| | vakgadayfeknhhksndpdfalnisekgivyllsffitnkemdslkanitgfkgkvdre |
| | sgnsikymatqriysfhtyrglkqkirtseegvketllmqmidelskvpnvvyqhlsttq |
| | qnsfiedwneyykdyeddvetddlsrvthpvirkryedrfnyfairfldeffdfptlrfq |
| | vhlgdyvhdrrtkqlgkvesdriikekvtvfarlkdinsakasyfhsleeqdkeeldnkw |
| | tlfpnpsydfpkehtlqhqgeqknagkigiyvklrdtqykekaaleearkslnpkersat |
| | kaskydiitqiieandnyksekplvftgqpiaylsmndihsmlfsllidnaelkktpeev |
| | eaklidqigkqineilskdtdtkilkkykdndlketdtdkitrdlardkeeieklileqk |
| | qraddynytsstkfnidksrkrkhllfnaekgkigvwlandikrfmfkeskskwkgyqhi |
| | elqklfayfdtsksdlelilsnmvmvkdypielidlykksrtivdflnkylearleyien |
| | vitrvknsigtpqfktvrkecftflkksnytvvsldkqverilsmplfiergfmddkptm |
| | legksykqhkeldadwfvhykensnyqnfydtevyeittedkrekakytkkikqqqkndv |
| | ftlmmvnymleevlklssndrlslnelyqtkeerivnkqvakdtqernknyiwnkvvdlq |
| | lcdglvhidnvklkdignfrkyendsrvkefltyqsdivwsaylsnevdsnklyvierql |
| | dnyesirskellkevqeiecsvynqvankeslkqsgnenfkqyvlqgllpigmdvremli |
| | lstdvkfkkeeiiqlgqageveqdlysliyirnkfahnqlpikeffdfcennyrsisdne |
| | yyaeyymeifrsikekyan |
| Bergeyella zoohelcum | menktsignniyynpfkpqdksyfagyfnaamentdsvfrelgkrlkgkeytsenffdai |
| ATCC 43767 | fkenislveyeryvkllsdyfpmarlldkkevpikerkenfkknfkgiikavrdlrnfyt |
| (AGYA01000037.1) | hkehgeveitdeifgvldemlkstvltvkkkkvktdktkeilkksiekqldilcqkkley |
| >EKB54193.1 | lrdtarkieekrrnqrergekelvapfkysdkrddliaaiyndafdvyidkkkdslkess |
| (SEQ ID NO: 114) | kakyntksdpqqeegdlkipiskngvvfllslfltkqeihafkskiagfkatvideatvs |
| | eatvshgknsicfmatheifshlaykklkrkvrtaeinygeaenaeqlsvyaketlmmqm |
| | ldelskvpdvvyqnlsedvqktfiedwneylkenngdygtmeeeqvihpvirklyedkfn |
| | yfairfldefaqfptlrfqvhlgnylhdsrpkenlisdrrikekitvfgrlselehkkal |
| | fikntetnedrehyweifpnpnydfpkenisvndkdfpiagsildrekqpvagkigikvk |
| | llnqqyvsevdkavkahqlkqrkaskpsiqniieeivpinesnpkeaivfggqptaylsm |
| | ndihsilyeffdkwekkkeklekkgekelrkeigkelekkivgkiqaqiqqiidkdtnak |
| | ilkpyqdgnstaidkeklikdlkqeqnilqklkdeqtvrekeyndfiayqdknreinkvr |
| | drnhkqylkdnlkrkypeaparkevlyyrekgkvavwlandikrfmptdfknewkgeqhs |
| | llqkslayyeqckeelknllpekvfqhlpfklggyfqqkylyqfytcyldkrleyisglv |
| | qqaenfksenkvfkkvenecfkflkkqnythkeldarvqsilgypiflergfmdekptii |
| | kgktfkgnealfadwfryykeyqnfqtfydtenyplvelekkqadrkrktkiyqqkkndv |
| | ftllmakhifksvfkqdsidqfsledlyqsreerlgnqerarqtgerntnyiwnktvdlk |
| | lcdgkitvenvklknvgdfikyeydqrvqaflkyeeniewqaflikeskeeenypyvver |
| | eiegyekvrreellkevhlieeyilekvkdkeilkkgdnqnfkyyilngllkqlknedve |
| | sykvfnlntepedvninqlkqeatdleqkafvltyirnkfahnqlpkkefwdycqekygk |
| | iekektyaeyfaevfkkekealik |
| Capnocytophaga | menktslgnniyynpfkpqdksyfagylnaamenidsvfrelgkrlkgkeytsenffdai |
| cynodegmi | fkenislveyelyvkllsdyfpmarlldkkevpikerkenfkknfrgiikavrdlrnfyt |
| (NZ_CDOD01000002.1) | hkehgeveitdeifgvldemlkstvltvkkkkiktdktkeilkksiekqldilcqkkley |
| >WP_041989581.1 | lkdtarkieekrrnqrergekklvprfeysdrrddliaaiyndafdvyidkkkdslkess |
| (SEQ ID NO: 115) | ktkyntesypqqeegdlkipiskngvvfllslflskqevhafkskiagfkatvideatvs |
| | hrknsicfmatheifshlaykklkrkvrtaeinyseaenaeqlsiyaketlmmqmldels |
| | kvpdvvyqnlsedvqktfiedwneylkenngdygtmeeeqvihpvirkryedkinyfair |
| | fldefaqfptlrfqvhlgnylhdsrpkehlisdrrikekitvfgrlselehkkalfiknt |
| | etnedrkhywevfpnpnydfpkenisvndkdfpiagsildrekqptagkigikvnllnqk |
| | yisevdkavkahqlkqrnnkpsigniieeivpingsnpkeiivfggqptaylsmndihsi |
| | lyeffdkwekkkeklekkgekelrkeigkeleekivgkiqtqiqqiidkdinakilkpyq |
| | dddstaidkeklikdlkqeqkilqklkneqtarekeyqeciayqeesrkikrsdksrqky |
| | lrnqlkrkypevptrkeilyyqekgkvavwlandikrfmptdfknewkgeqhsllqksla |
| | yyeqckeelknllpqqkvfkhlpfelgghfqqkylyqfytryldkrlehisglvqqaenf |
| | knenkvfkkvenecfkflkkqnythkgldaqaqsvlgypiflergfmdekptiikgklfk |
| | gneslftdwfryykeyqnfqtfydtenyplvelekkqadrkretkiyqqkkndvftllma |
| | khifksvfkqdsidrfsledlyqsreerlenqekakqtgerntnyiwnktvdlnlcdgkv |
| | tvenvklknvgnfikyeydqrvqtflkyeenikwqaflikeskeeenypyivereieqye |
| | kvrreellkevhlieeyilekvkdkeilkkgdnqnfkyyilngllkqlknedvesykvfn |
| | lntkpedvninqlkqeatdleqkafvltyirnkfahnqlpkkefwdycqekygkiekekt |
| | yaeyfaevfkrekealmk |
| Bergeyella zoohelcum | menktslgnniyynpfkpqdksyfagyfnaamentdsvfrelgkrlkgkeytsenffdai |
| ATCC 43767 | fkenislveyelyvkllsdyfpmarlldkkevpikerkenfkknfkgiikavrdlrnfyt |
| (NZ_JH932293.1) | hkehgeveitdeifgvldemlkstvltvkkkkvktdktkeilkksiekqldilcqkkley |
| >WP_002664492.1 | lrdtarkieekrrnqrergekelvapfkysdkrddliaaiyndafdvyidkkkdslkess |
| (SEQ ID NO: 116) | kakyntksdpqqeegdlkipiskngvvfllslfltkqeihafkskiagfkatvideatvs |
| | eatvshgknsicfmatheifshlaykklkrkvrtaeinygeaenaeqlsvyaketlmmqm |
| | ldelsk-vpdwyqnlsedvqktfiedwneylkenngdygtmeeeqvihpvirklyedkfn |
| | yfairfldefaqfptlrfqvhlgnylhdsrpkenlisdrrikekitvfgrlselehkkal |
| | fikntetnedrehyweifpnpnydfpkenisvndkdfpiagsildrekqpvagkigikvk |
| | llnqqyvsevdkavkahqlkqrkaskpsiqniieeivpinesnpkeaivfggqptaylsm |
| | ndihsilyeffdkwekkkeklekkgekelrkeigkelekkivgkiqaqiqqiidkdtnak |
| | ilkpyqdgnstaidkeklikdlkqeqnilqklkdeqtvrekeyndfiayqdknreinkvr |
| | drnhkqylkdnlkrkypeaparkevlyyrekgkvavwlandikffmptdfknewkgeqhs |
| | llqkslayyeqckeelknllpekvfqhlpfklggyfqqkylyqfytcyldkrleyisglv |
| | qqaenfksenkvfkkvenecfkflkkqnythkeldarvqsilgypiflergfmdekptii |
| | kgktfkgnealfadwfryykeyqnfqtfydtenyplvelekkqadrkrktkiyqqkkndv |
| | ftllmakhifksvfkqdsidqfsledlyqsreerlgnqerarqtgerntnyiwnktvdlk |
| | lcdgkitvemllknvgclfikyeydqrvqaflkyeeniewqaflikeskeeenypriver |
| | eiegyekvn-eellkevhlieeyilekvkdkeilkkgdnqnfkyyilngllkqlknedve |
| | sykvfnlntepedvninqlkqeatdleqkafvltyirnkfahnqlpkkefwdycqekygk |
| | iekektyaeyfaevfkkekealik |
| Flavobacterium sp. 316 | mdnnitvektelglgitynhdkvedkhyfggffnlaqnnidlvaqefkkrlliqgkdsin |
| (NZ_JYGZ01000003.1) | ifanyfsdqcsitnlergikilaeyfpvvsyidldeknksksirehlillletinnlrny |
| >WP_045968377.1 | ythyyhkkiiidgslfplldtillkyvleikkkklkedktkqllkkglekemtilfnlmk |
| (SEQ ID NO: 117) | aeqkekkikgwnidenikgavlnrafshllyndelsdyrkskyntedetlkdtltesgil |
| | fllsfflnkkeqeqlkanikgykgkiasipdeeitlknnslrnmathwtyshltykglkh |
| | riktdheketllvnmvdylskvpheiyqnlseqnkslfledineymrdneenhdsseasr |
| | vihpvirkryenkfayfairfldefaefptltfmvnvgnyihdnrkkdiggtslitnrti |
| | kqqinvlgnlteihkkkndyfekeenkektlewelfpnpsyhfqkenipifidleksket |
| | ndlakeyakekkkifgssrkkqqntakknretiinlvfdkyktsdrktvtfeqptallsf |
| | nelnsflyaflvenktgkelekiiiekianqyqilkncsstvdktndnipksikkivntt |
| | tdsfyfegkkidieklekditieiektnekletikeneesaqnykrnerntqkrklyrky |
| | vfftneigieatwitndilrfldnkenwkgyqhselqkfisqydnykkealgllesewnl |
| | esdaffgqnlkrmfqsnstfetfykkyldnrkntletylsaienlktmtdvrpkvlkkkw |
| | telfiffdkkiyllstietkinelitkpinlsrgifeekptfingknpnkennqhlfanw |
| | fiyakkqtilqdfynlpleqpkaitnlkkhkyklersinnlkiediyikqmvdflyqklf |
| | eqsfigslqdlytskekreiekgkakneqtpdesfiwkkqveinthngriiaktkikdig |
| | kfknlltdnkiahlisyddriwdfslnndgditkklysintelesyetirrekllkqiqq |
| | feqfllegeteysaerkhpekfekdcnpnfkkyiiegvinkiipnheieeieilkskedv |
| | fkinfsdililnndnikkgyllimirnkfahnqlidknlfnfslqlysknenenfseyln |
| | kvcqniiqefkeklk |
| Psychroflexus torquis | mesiiglglsfnpyktadkhyfgsflnlvennlnavfaefkerisykakdenissliekh |
| ATCC 700755 | fidnmsivdyekkisilngylpiidflddelennlntrvknfkknfiilaeaieklrdyy |
| (NC_018721.1) | thfyhdpilfednkepllelldevllktildvkkkylktdktkeilkdslreemdllvir |
| >WP_015024765.1 | ktdelrekkktnpkiqhtdssqiknsifndafqgllyedkgnnkktqvshraktrlnpkd |
| (SEQ ID NO: 118) | ihkqeerdfeiplstsglvflmslflskkeiedfksnikgfkgkvvkdenhnslkymath |
| | rvysilafkglkyriktdtfsketlmmqmidelskvpdcvyqnlsetkqkdfiedwneyf |
| | kdneentenlensrvvhpvirkryedkfnyfairfldefanfktlkfqvfmgyyihdqrt |
| | ktigttnittertykekinvfgklskmdnlkkhffsqlsddentdweffpnpsynfltqa |
| | dnspannipiylelknqqiikekdaikaevnqtqnrnpnkpskrdllnkilktyedfhqg |
| | dptailslneipallhlflvkpnnktgqqieniirikiekqfkainhpsknnkgipkslf |
| | adtnvrvnaiklkkdleaeldmlnkkhiafkenqkassnydkllkehqftpknkrpelrk |
| | yvfyksekgeeatwlandikrfmpkdfktkwkgcqhselqrklafydrhtkqdikellsg |
| | cefdhslldinayfqkdnfedffskylenrietlegvlkklhdfkneptplkgvflmcfk |
| | flkrqnyvtespeiikkrilakptflprgvfderptmkkgknplkdknefaewfveylen |
| | kdyqkfynaeeynm-dadfkknavikkqklkdfytlqmvnyllkevfgkdemnlqlself |
| | qtrqerlklqgiakkqmnketgdssentrnqtyiwnkdvpvsffngkvtidkvklknigk |
| | ykryerdervktfigyevdekwmmylphnwkdlysvkpinvidlqiqeyeeirshellke |
| | iqnleqyiydhttdknillqdgnpnfkmyvlnglligikqvnipdfivlkqntnfdkidf |
| | tgiascselekktiiliairnkfahnqlpnkmiydlaneflkieknetyanyylkvlkkm |
| | isdla |
| Flavobacterium | mssknesynkqktfnhykqedkyffggflnnaddnlrqvgkefktrinfnhnnnelasvf |
| columnare ATCC 49512 | kdyfnkeksvakrehalnllsnyfpvleriqkhtnhnfeqtreifellldtikkftdyyt |
| (NC_016510.2) | hhyhkpitinpkiydflddtlldvlitikkkkvkndtsrellkeklrpeltqlknqkree |
| >WP_014165541.1 | likkgkklleenlenavfnhclrpfleenktddkqnktvslrkyrkskpneetsitltqs |
| (SEQ ID NO: 119) | glvflmsfahrkefqvftsglegfkalcvntikeeeislnknnivymithwsysyynfkg |
| | lkhriktdqgvstleqnntthsltntntkealltqivdylskvpneiyetlsekqqkefe |
| | edineymrenpenedsffssivshkvirkryenkfnyfamrfldeyaelptlrfmvnfgd |
| | yikdrqkkilesiqfdseriikkeihlfeklslvteykknvylketsnidlsffplfpnp |
| | syvmannnipfyidsrsnnldeylnqkkkaqsqnkkrnltfekynkeqskdaiiamlqke |
| | igvkdlqqrstigllscnelpsmlyevivkdikgaelenkiaqkireqyqsirdftldsp |
| | qkdnipttliktintdssvtfenqpidiprlknaiqkeltltqekllnykeheievdnyn |
| | rnkntykaknqpknkvddkklqrkyvfyrneirqeanwlasdlihfmknkslwkgymhne |
| | lqsflaffedkkndcialletvfnlkedciltkglknlflkhgnfidfykeylklkedfl |
| | ntestflengliglppkilkkelskilkyifivfqkrqflikeleekknnlyadainlsr |
| | gifdekptmipfklqmpdefaswfvasyqynnyqsfyeltpdiverdkkkkyknfraink |
| | vkiqdyylklmvdtlyqdlfnqpldkslsdfyvskaerekikadakayqkrndsslwnkv |
| | ihlslqnnritanpklkdigkykralqdekiatlltyddrtwtyalqkpekenendykel |
| | hytalnmelqeyekvrskellkqvqelekqileeytdflstqihpadferegnpnfkkyl |
| | ahsileneddldklpekveamreldetitnpiikkaivliiirnkmahnqyppkfiydla |
| | nrfvpkkeeeyfatyfnrvfetitkelwenkekkdktqv |
| Flavobacterium | mssknesynkqktfnhykqedkyffggflnnaddnlrqvgkefktrinfnhnnnelasvf |
| columnare | kdyfnkeksvakrehalnllsnyfpvleriqkhtnhnfeqtreifellldtikkftdyyt |
| (NZ_CP013992.1) | hhyhkpitinpkyydflddfildvlitikkkkvkndtsrellkekirpeltqlknqkree |
| >WP_060381855.1 | likkgkklleenlenavfnhclrpfleenktddkqnktvslrkyrkskpneetsitltqs |
| (SEQ ID NO: 120) | glvflisfflhrkefqvftsglegfkakvntikeeeislnknnivymithwsysyynfkg |
| | lkhriktdqgvstleqnntthsltntntkealltqivdylskvpneiyetlsekqqkefe |
| | edineymrenpenedstfssivshkvirklyenkfnyfamrfldeyaelptlrfmvnfgd |
| | yikdrqkkilesiqfdseriikkeihlfeklglvteykknvylketsnidlsffplfpsp |
| | syvmanrmipfyidsrsnnldeylnqkkkaqsqnrkrnllfekynkeqskdaiiamlqke |
| | igvkdlqqrstigllscnelpsmlyevivkdikgaelenkiaqkireqyqsirdftldsp |
| | qkdnipttltktistdtsvtfenqpidiprlknalqkeltltqekllnvlqheievdnyn |
| | rnkntykfknqpkdkvddnklqrkyvfyrneigqeanwlasdlihfmknkslwkgymhne |
| | lqsflaffedkkndcialletvfnlkedciltkdlknlflkhgnfidfykeylklkedfl |
| | ntestflengfiglppkilkkelskrinyifivfqkrqfiikeleekknnlyadainlsr |
| | gifdekptmipfklqmpdefaswfvasyqynnyqsfyeltpdkiendkkkkyknfraink |
| | vkiqdyylklmvdtlyqdlfnqpldkslsdfyvsktdrekikadakayqkrndsflwnkv |
| | ihlslqnnritanpklkdigkykralqdekiatlltyddrtwtyalqkpekenendykel |
| | hytalnmelqeyekvrskkllkqvqelekqildkfydfsnnathpedleiedkkgkrhpn |
| | fklyitkallkneseiinlenidieilikyydynteklkekiknmdedekakivntkeny |
| | nkitnvlikkalvliiirnkmahnqyppkfiydlatrfvpkkeeeyfacyfnrvfetitt |
| | elwenkkkakeiv |
| Flavobacterium | mssknesynkqktfnhykqedkyffggflnnaddnlrqvgkefktrinfnhnnnelasvf |
| columnare | kdyfnkeksvakrehalnllsnyfpvleriqkhtnhnfeqtreifellldtilddrdyyt |
| (NZ_CP015107.1) | hhyhkpitinpkiydflddtlldvlitikkkkvkndtsrellkeklrpeltqlknqkree |
| >WP_063744070.1 | likkgkklleenlenavfnhclrpfleenktddkqnktvslrkyrkskpneetsitltqs |
| (SEQ ID NO: 121) | glvflmsfflhrkefqvftsglegfkakvntikeekislnknnivymithwsysyynfkg |
| | lkhriktdqgvstleqnntthsltntntkealltqivdylskvpneiyetlsekqqkefe |
| | edineymrenpenedstfssivshkvirklyenkfnyfamffldeyaelptlrfmvnfgd |
| | yikdrqkkilesiqfdseriikkeihlfeklglvteykknvylketsnidlsrfplfpsp |
| | syvmannnipfyidsrsnnldeylnqkkkaqsqnrkrnllfekynkeqskdaiiamlqke |
| | igvkdlqqrstigllscnelpsmlyevivkdikgaelenkiaqkireqyqsirdftlnsp |
| | qkdnipttliktistdtsvtfenqpidiprlknaiqkelaltqekllnvlqheievimyn |
| | rnkntykfknqpkdkvddnklqrkyvfyrneigqeanwlasdlihfmknkslwkgymhne |
| | lqsflaffedkkndcialletvfnlkedciltkdlknlflkhgnfidfykeylklkedfl |
| | ntestflengfiglppkilkkelskrinyifivfqkrqfiikeleekknnlyadainlsr |
| | gifdekptmipfklqmpdefaswfvasyqynnyqsfyeltpdkiendkkkkyknfraink |
| | vkiqdyylklmvdtlyqdlfnqpldkslsdfyvsktdrekikadakayqkrndsflwnkv |
| | ihlslqnnritanpklkdigkykralqdekiatlltyddrtwtyalqkpekenendykel |
| | hytalnmelqeyekvrskkllkqvqelekqildkfydfsnnathpedleiedkkgkrhpn |
| | fklyitkallkneseiinlenidieilikyydynteklkekiknmdedekakivntkeny |
| | nkitnvlikkalvliiirnkmahnqyppkfiydlatrfvpkkeeeyfacyfnrvfetitt |
| | elwenkkkakeiv |
| Flavobacterium | mssknesynkqktfnhykqedkyffggflnnaddnlrqvgkefktrinfnhnnnelasvf |
| columnare | kdyfnkeksvakrehalnllsnyfpvleriqkhtnhnfeqtreifellldtilddrdyyt |
| (NZ_CP016277.1) | hhyhkpitinpkiydflddtlldvlitikkkkvkndtsrellkeklrpeltqlknqkree |
| >WP_065213424.1 | likkgkklleenlenavfnhclipfleenktddkqnktvslrkyrkskpneetsitltqs |
| (SEQ ID NO: 122) | glvflmsfflhrkefqvftsglerfkakvntikeeeislnknnivymithwsysyynfkg |
| | lkhriktdqgvstleqnntthsltntntkealltqivdylskvpneiyetlsekqqkefe |
| | edineymrenpenedsffssivshkvirkryenkfnyfamrfldeyaelptlrfmvnfgd |
| | yikdrqkkilesiqfdseriikkeihlfeklslvteykknvylketsnidlsrfplfpnp |
| | syvmanrmipfyidsrsnnldeylnqkkkaqsqnkkrnllfekynkeqskdaiiamlqke |
| | igvkdlqqrstigllscnelpsmlyevivkdikgaelenkiaqkireqyqsirdftldsp |
| | qkdnipttliktintdssvtfenqpidiprlknalqkeltltqekllnvkeheievdnyn |
| | rnkntykfknqpknkvddkklqrkyvfyrneirqeanwlasdlihfmknkslwkgymhne |
| | lqsflaffedkkndcialletvfnlkedciltkglknlflkhgnfidfykeylklkedfl |
| | stestflengfiglppkilkkelskrlkyifivfqkrqfiikeleekknnlyadainlsr |
| | gifdekptmipfklqmpdefaswfvasyqynnyqsfyeltpdiverdkkkkyknfraink |
| | vkiqdyylklmvdtlyqdlfnqpldkslsdfyvskaerekikadakayqklndsslwnkv |
| | ihlslqnnritanpklkdigkykralqdekiatlltydartwtyalqkpekenendykel |
| | hytalnmelqeyekvrskellkqvqelekkildkfydfsnnashpedleiedkkgkrhpn |
| | fklyitkallkneseiinlenidieillkyydynteelkekiknmdedekakiintkeny |
| | nkitnvlikkalvliiirnkmahnqyppkfiydlanrfvpkkeeeyfatyfnryfetitk |
| | elwenkekkdktqv |
| Chryseobacterium sp. | metqfighgiaydhskiqdkhffggflnlaennikavlkafsekfnvgnvdvkqfadvsl |
| YR477 | kdnlpdndfqkryvsflkmyfpyydfinipmirakfrsdlttlfksvdqlmfythyyhkp |
| (NZ_KN549099.1) | ldfdaslfillddifartakevrdqkmkddlftrqllskslseelqkgyelqlerlkelm |
| >WP_047431796.1 | lgkkvnihdqlgikngvlnnafnhliykdgesfktkltyssaltsfesaengieisqsgl |
| (SEQ ID NO: 123) | lfllsmflkrkeiedlknrnkgfkakvvidedgkvnglkfmathwvfsylcfkglkskls |
| | tefheetlliqiidelskvpdelycafdketrdkfiedineyvkeghqdfsledakvihp |
| | virkryenkfnyfairfldefvkfpslrfqvhvgnyvhdrriknidgttfetervvkdri |
| | kvfgrlseissykaqylssysdkhdetgweifpnpsyvfinrmipihisvdtsfkkeiad |
| | fkklrraqvpdelkirgaekkrkfeitqmigsksvinqeepiallslneipallyeilin |
| | gkepaeieriikdklnerqdviknynpenwlpasqisrrlrsnkgeriintdkllqlvtk |
| | ellvteqklkiisdnrealkqkkegkyirkfiftnselgreaiwladdikrfmpadvrke |
| | wkgyqhsqlqqslafynsrpkealailesswnlkdekiiwnewilksftqnkffdafyne |
| | ylkgrkkyfaffsehivqytsnaknlqkfikqqmpkdlfekrhyliedlqteknkilskp |
| | fifprgifdkkplfikgvkvedspesfanwyqygyqkdhqfqkfydwkrdysdvflehlg |
| | kpfinngdrrtlgmeelkeriiikqdlkikkikiqdlflrliaenlfqkvfkysaklpls |
| | dfyltqeermekenmaalqnvreegdkspniikdnfiwskmipykkgqiienavklkdig |
| | klnvlslddkvqtllsyddakpwskialenefsigensyevin-eklfkeiqqfeseilf |
| | rsgwdginhpaqlednmpkfkmyivngilrksaglysqgediwfeynaclfnnldadvle |
| | tkselvqlaflvtairnkfahnqlpakefyfyirakygfadepsvalvylnftkyainef |
| | kkvmi |
| Riemerella anatipestifer | mekpllpnvytlkhkffwgaflniarhnafitichineqlglktpsnddkivdvvcetwn |
| ATCC 11845 = DSM | nilnndhdllkksqltelilkhfpfltamcyhppkkegkkkghqkeqqkekeseaqsqae |
| 15868 (NC_014738.1) | alnpskliealeilvnqlhslrnyyshykhkkpdaekdifkhlykafdaslrmykedyka |
| >WP_004919755.1 | hftvnitrdfahlnrkgknkqdnpdfnryffekdgfftesgllfftnlfldkrdaywmlk |
| (SEQ ID NO: 124) | kvsgfkashkqrekmttevfcrsrillpklrlesrydhnqmlldmlselsrcpkllyekl |
| | seenkkhfqveadgfldeieeeqnpfkdtlirhqdifpyfalryldlnesfksiifqvdl |
| | gtyhyciydkkigdeqekrhltrtllsfgrlqdfteim-pqewkaltkdldyketsnqpf |
| | iskttphyhitdnkigfrlgtskelypsleikdganriakypynsgfrahafisvhellp |
| | lmfyqhltgksedllketvrhiqriykdfeeerintiedlekanqgrlplgafpkqmlgl |
| | lqnkqpdlsekakikiekliaetkllshrlntklksspklgkrrekliktgvladwlykd |
| | fmrfqpvaydaqnqpiksskanstefwfirralalyggeknrlegyfkqtnligntnphp |
| | flnlcfnwkacmlvdfyqqyleqrekfleaiknqpwepyqyclllkipkenrknlvkgwe |
| | qggislprglfteairetlsedlmlskpirkeikkhgrvgfisraitlyfkekyqdkhqs |
| | fynlsykleakapllkreehyeywqqnkpqsptesqrlelhtsdrwkdyllykrwqhlek |
| | klrlyrnqdvmlwlmtleltknhfkelnlnyhqlklenlavnvqeadaklnpinqtlpmv |
| | lpvkvypatafgevqyhktpirtvyireehtkalkmgnfkalvkdrrlnglfsfikeend |
| | tqkhpisqlrlrreleiyqslrvdafketlsleekllnkhtslsslenefralleewkke |
| | yaassmvtdehiafiasvrnafchnqypfykealhapiplftvaqptteekdglgiaeal |
| | lkvlreyceivksqi |
| Riemerella anatipestifer | mffsfhnaqrvifkhlykafdaslrmvkedykahftvnltrdfahlnrkgknkqdnpdfn |
| RA-CH-2 | ryrfekdgfftesgllfftnlfldkrdaywmlkkvsgfkashkqrekmttevfcrsrill |
| (NC_020125.1) | pklrlesrydhnqmlldmlselsrcpkllyeklseenkkhfqveadgfldeieeeqnpfk |
| >WP_015345620.1 | dtlirhqdrfpyfalryldlnesfksirfqvdlgtyhyciydkkigdeqekrhltrtlls |
| (SEQ ID NO: 125) | fgrlqdfteinrpqewkaltkdldyketsnqpfiskttphyhitdnkigfrlgtskelyp |
| COMMENT | sleikdganriakypynsgfvahafisvhellplmfyqhltgksedllketvrhiqriyk |
| REFSEQ: This record | dfeeerintiedlekanqgrlplgafpkqmlgllqnkqpdlsekakikiekliaetklls |
| represents a single, non- | hrlntklksspklgkrrekliktgvladwlvkdfmrfqpvaydaqnqpiksskanstefw |
| redundant, protein | firralalyggeknrlegyfkqtnligntnphpflnkfnwkacrnlvdfyqqylegrekf |
| sequence which may be | leaikhqpwepyqyclllkvpkenrknlvkgweqggislprglfteairetlskdltlsk |
| annotated on many | pirkeikkhgrygfisraitlyfkekyqdkhqsfynlsykleakapllkkeehyeywqqn |
| different RefSeq | kpqsptesqrlelhtsdrwkdyllykrwqhlekklrlyrnqdimlwlmtleltknhfkel |
| genomes from the same, | nlnyhqlklenlavnvqeadaklnpinqtlpmvlpvkvypttafgevqyhetpirtvyir |
| or different, species | eeqtkalkmgnfkalvkdrrlnglfsfikeendtqkhpisqlrlrreleiyqslrvdafk |
| (suppressed in databse) | etlsleekllnkhaslsslenefrtlleewkkkyaassmvtdkhiafiasvrnafchnqy |
| | pfyketlhapillftvaqptteekdglgiaeallkvlreyceivksqi |
| Riemerella anatipestifer | mffsfhnaqrvifkhlykafdaslrmykedykahftvnitrdfahlnrkgknkqdnpdfn |
| (NZ_CP007504.1) | ryrfekdgfftesgllfftnlfldkrdaywmlkkvsgfkashkqrekmttevfcrsrill |
| >WP_049354263.1 | pklrlesrydhnqmlldmlselsrcpkllyeklseenkkhfqveadgfldeieeeqnpfk |
| (SEQ ID NO: 126) | dtlirhqdrfpyfalryldlnesfksirfqvdlgtyhyciydkkigdeqekrhltrtlls |
| | fgrlqdfteinrpqewkaltkdldyketsnqpfiskttphyhitdnkigfrlgtskelyp |
| | sleikdganriakypynsgfvahafisvhellplmfyqhltgksedllketvrhiqriyk |
| | dfeeerintiedlekanqgrlplgafpkqmlgllqnkqpdlsekakikiekliaetklls |
| | hrlntklksspklgkrrekliktgvladwlykdfmrfqpvaydaqnqpiksskanstefw |
| | firralalyggeknrlegyfkqtnligntnphpflnkfnwkacrnlvdfyqqyleqrekl |
| | leaiknqpwepyqyclllkipkenrknlvkgweqggislprglfteairetlsedlmlsk |
| | pirkeikkhgrvgfisraitlyfkekyqdkhqsfynlsykleakapllkreehyeywqqn |
| | kpqsptesqrlelhtsdrwkdyllykrwqhlekklrlyrnqdvmlwlmtleltknhfkel |
| | nlnyhqlklenlavnvqeadaldnpinqtlpmvlpvkvypatafgevqyhktpirtvyir |
| | eehtkalkmgnfkalvkdrrlnglfsfikeendtqkhpisqlrlrreleiyqslrvdafk |
| | etlsleekllnkhtslsslenefralleewkkeyaassmvtdehiafiasvrnafchnqy |
| | pfykealhapiplftvaqptteekdglgiaeallkvlreyceivksqi |
| Riemerella anatipestifer | mffsfhnaqrvifkhlykafdaslrmvkedykahftvnltrdfahlnrkgknkqdnpdfn |
| (NZ_LUDU01000012.1) | ryrfekdgfftesgllfftnlfldkrdaywmlkkvsgfkashkqsekmttevfcrsrill |
| >WP_061710138.1 | pklrlesrydhnqmlldmlselsrcpkllyeklsekdkkcfqveadgfldeieeeqnpfk |
| (SEQ ID NO: 127) | dtlirhqdrfpyfalryldlnesfksirfqvdlgtyhyciydkkigyeqekrhltrftln |
| | fgrlqdfteinrpqewkaltkdldynetsnqpfiskttphyhitdnkigfrlrtskelyp |
| | slevkdganriakypynsdfvahafisisvhellplmfyqhltgksedllketvrhiqri |
| | ykdfeeerintiedlekanqgrlplgafpkqmlgllqnkqpdlsekakikiekliaetkl |
| | lshrlntklksspklgkrrekliktgvladwlvkdfmrfqpvvydaqnqpiksskanste |
| | srlirralalyggeknrlegyfkqtnligntnphpflnkfnwkacrnlvdfyqqyleqre |
| | kfleaikhqpwepyqyclllkvpkenrknlvkgweqggislprglfteairetlskdltl |
| | skpirkeikkhgrvgfisraitlyfkekyqdkhqsfynlsykleakapllkkeehyeywq |
| | qnkpqsptesqrlelhtsdrwkdyllykrwqhlekklrlyrnqdimlwlmtleltknhfk |
| | elnlnyhqlklenlavnvqeadaklnpinqtlpmvlpvkvypttafgevqyhetpirtvy |
| | ireeqtkalkmgnfkalvkdrhlnglfsfikeendtqkhpisqlrlrreleiyqslrvda |
| | fketlsleekllnkhaslsslenefrtlleewkkkyaassmvtdkhiafiasvrnafchn |
| | qypfyketlhapillftvaqptteekdglgiaeallrvlreyceivksqi |
| Riemerella anatipestifer | mekplppnvytlkhkffwgaflniarhnafitichineqlglttppnddkiadvvcgtwn |
| (NZ_LUDI01000010.1) | nilnndhdllkksqltelilkhfpflaamcyhppkkegkkkgsqkeqqkekeneaqsqae |
| >WP_064970887.1 | alnpselikvlktlvkqlrtlrnyyshhshkkpdaekdifkhlykafdaslrmvkedyka |
| (SEQ ID NO: 128) | hftvnitqdfahlnrkgknkqdnpdfdlyffekdgfftesgllfftnlfldkrdaywmlk |
| | kvsgfkashkqsekmttevfcrsrillpkftlesrydhnqmlldmlselstypkllyekl |
| | seedkkrfqveadgfldeieeeqnpfkdtlirhqdrfpyfalryldlnesfksirfqvdl |
| | gtyhyciydkkigdeqekrhltrtllsfgrlqdfteinrpqewkaltkdldyketskqpf |
| | iskttphyhitdnkigfrlgtskelypslevkdganriaqypynsdfrahafisvhellp |
| | lmfyqhltgksedllketvrhiqriykdfeeerintiedlekanqgrlplgafpkqmlgl |
| | lqnkqpdlsekakikiekliaetkllshrlntklksspklgkrrekliktgvladwlvkd |
| | fmrfqpvaydaqnqpiesskanstefqliqralalyggeknrlegyfkqtnligntnphp |
| | flnkfnwkacrnlvdfyqqyleqrekfleaiknqpwepyqyclllkipkenrknlvkgwe |
| | qggislprglfteairetlskdltlskpirkeikkhgrvgfisraitlyfrekyqddhqs |
| | fydlpykleakasplpkkehyeywqqnkpqsptelqrlelhtsdrwkdyllykrwqhlek |
| | klrlyrnqdvmlwlmtleltknhfkelnlnyhqlklenlavnvqeadaldnpinqtlpmv |
| | lpvkvypatafgevqyqetpirtvyireeqtkalkmgnfkalvkdrrlnglfsfikeend |
| | tqkhpisqlrlrreleiyqslrvdafketlnleekllkkhtslssvenkfrilleewkke |
| | yaassmvtdehiafiasvrnafchnqypfyeealhapiplftvaqqtteekdglgiaeal |
| | lrvlreyceivksqi |
| Prevotella saccharolytica | mmekenvqgshiyyeptdkcfwaafynlarhnayltiahinsfvnskkginnddkvldii |
| F0055 | ddwskfdndllmgarinklilkhfpflkaplyqlakrktrkqqgkeqqdyekkgdedpev |
| (AMEP01000091.1) | iqeaianafkmanvrktlhaflkqledlrnhfshynynspakkmevkfddgfcnklyyvf |
| >EKY00089.1 | daalqmvkddnrmnpeinmqtdfehlvrlgrnrkipntfkynftnsdgtinrmgllffvs |
| (SEQ ID NO: 129) | lflekrdaiwmqkkikgfkggtenymrmtnevfcrnrmvipklrletdydnhqlmfdmln |
| | elvrcplslykrlkqedqdkfrvpiefldedneadnpyqenansdenpteetdplkntiv |
| | rhqhrfpyfvlryfdlnevfkqlrfqinlgcyhfsiydktigertekrhltrtlfgfdrl |
| | qnfsvklqpehwknmvkhldteessdkpylsdamphyqienekigihflktdtekketvw |
| | psleveevssmnkykseknitadaflsthellpmnifyyqllsseektraaagdkvqgvl |
| | qsyrkkifdiyddfangtinsmqklderlakdnllrgnmpqqmlailehqepdmeqkake |
| | kldrlitetkkrigkledqfkqkvrigkrradlpkvgsiadwlyndmmifqpakrnadnt |
| | gvpdskansteyrllqealafysaykdrlepyfrqvnliggtnphpflhrvdwkkcnhll |
| | sfyhdyleakeqylshlspadwqkhqhflllkvrkdiqnekkdwkkslvagwkngfnlpr |
| | glftesiktwfstdadkvqitdtklfenrvgliakliplyydlwyndkpqpfyqypfnin |
| | drykpedtrkrftaassklwnekkmlyknaqpdssdkieypqyldflswklderelrmlr |
| | nqdmmvwlmckdlfaqctvegvefadlklsqlevdvnvqdnlnvinnvssmilplsvyps |
| | daqgnvlrnskplhtvyvqenntkllkqgnfksllkdrrlnglfsfiaaegedlqqhplt |
| | knrleyelsiyqtnirisvfeqtlqlekailtmkticgnnfnnllnswsehrtdkktlqp |
| | didfliavrnafshnqypmstntvmqgiekfniqtpkleekdglgiasqlakktkdaasr |
| | lqniinggtn |
| Prevotella saccharolytica | medkpfwaaffnlarhnvyltvnhinklldleklydegkhkeiferedifnisddvmnda |
| JCM 17484 | nsngkkrkldikkiwddldtdltrkyqlrelilkhfpfiqpaiigaqtkerttidkdkrs |
| (NZ_BAKN01000001.1) | tstsndslkqtgegdindllslsnvksmffrllqileqlrnyyshvkhsksatmpnfded |
| >WP_051522484.1 | llnwmryifidsvnkvkedyssnsvidpntsfshliykdeqgkikpciypftskdgsina |
| (SEQ ID NO: 130) | fgllffvslflekqdsiwmqkkipgfkkasenymkmtnevfcrnhillpkirletvydkd |
| COMMENT | wmlldmlnevvrcplslykrltpaaqnkfkvpekssdnanrqeddnpfsrilvrhqnrfp |
| REF SEQ: This record | yfvliffdlnevfttlifqinlgcyhfaickkqigdkkevhhlirtlygfsrlqnftqnt |
| represents a single, non- | rpeewntlykttepssgndgktvqgvplpyisytiphyqienekigikifdgdtavdtdi |
| redundant, protein | wpsvstekqlnkpdkytltpgfkadvflsvhellpmmfyyqlllcegmlktdagnavekv |
| sequence which may be | lidtrnaifnlydafvqekintitdlenylqdkpilighlpkqmidllkghqrdmlkave |
| annotated on many | qkkamlikdterrlklldkqlkqetdvaakntgtllkngqiadwlvndmmrfqpvkrdke |
| different RefSeq | gnpincskansteyqmlqrafafyatdscrlsryftqlhlihsdnshlflsifeydkqpn |
| genomes from the same, | liafyaaylkakleflnelqpqnwasdnyflllrapkndrqklaegwkngfnlprglfte |
| or different, species | kiktwfnehktivdisdcdifknrvgqvarlipvffdkkfkdhsqpfyrydfnvgnvskp |
| (suppressed in databse) | teanylskgkreelfksyqnkiknnipaektkeyreyknfslwkkferelrliknqdili |
| | wlmcknlfdekikpkkdilepriaysyikldslqtntstagslnalakvvpmtlaihids |
| | pkpkgkagnnekenkeftvyikeegtkllkwgnfktlladrrikglfsyiehddidlkqh |
| | pltkrvvdleldlyqtcridifqqtlgleaqlldkysdlntdnfyqmligwrkkegiprn |
| | ikedtdflkdvrnafshnqypdskkiafrrirkinpkelileeeeglgiatqmykevekv |
| | vnrikrielfd |
| Prevotella buccae ATCC | mqkqdklfvdrkknaifafpkyitimenkekpepiyyeltdkhfwaaflnlarhnvytti |
| 33574 | nhinrrleiaelkddgymmgikgswneqakkldkkvrlrdlimkhfpfleaaayemtnsk |
| (AEPD01000005.1) | spnnkeqrekeqsealslnnlknvlfifleklqvlrnyyshykyseespkpifetsllkn |
| >EFU31981.1 | mylwfdanvrlykrdymhhenidmqrdfthlnrkkqvgrtkniidspnfhyhfadkegnm |
| (SEQ ID NO: 131) | tiagllffvslfldkkdaiwmqkklkgfkdgrnlreqmtnevfcrsrislpklklenvqt |
| | kdwmqldmlnelvrcpkslyerlrekdresflwpfdifsddynaeeepfkntivrhqdrf |
| | pyfvlryfdlneifeqlrfqidlgtyhfsiynkrigdedevrhlthhlygfariqdfapq |
| | nqpeewrklvkdldhfetsqepyisktaphyhlenekigikfcsahnnlfpslqtdktcn |
| | grskfnlgtqftaeaflsvhellpmmfyyllltkdysrkesadkvegiirkeisniyaiy |
| | dafanneinsiadltrrlqntnilqghlpkqmisilkgrqkdmgkeaerkigemiddtqr |
| | rldllckqtnqkirigkrnagllksgkiadwlvndmmifqpvqkdqnnipinnskanste |
| | yrmlqralalfgsenfrlkayfnqmnlvgndnphpflaetqwehqtnilsfyrnyleark |
| | kylkglkpqnwkqyqhflilkvqktnintivtgwknsfnlprgiftqpirewfekhrmsk |
| | riydqilsfdivgfrakaiplyfaeeykdnvqpfydypfnignrlkpkkrqfldkkeive |
| | lwqknkelfknypsekkktdlayldflswkkferelrliknqdivtwlmfkelfnmatve |
| | glkigeihlrdidtntaneesnnilnrimpmldpvktyetdnkgnilkerplaffyieet |
| | etkvlkqgnfkalvkdrringlfsfaettdlnleehpisklsvdlelikyqttrisifem |
| | tlglekklidkystlptdsfrnmlerwlqckanrpelknyvnsliavrnafshnqypmyd |
| | atlfaevkkitlfpsvdtkkielniapqlleivgkaikeieksenkn |
| Prevotella buccae ATCC | mqkqdklfvdrkknaifafpkyitimenkekpepiyyeltdkhfwaaflnlarhnvytti |
| 33574 | nhinrrleiaelkddgymmgikgswneqakkldkkvrlrdlimkhfpfleaaayemtnsk |
| (NZ_GL586311.1) | spnnkeqrekeqsealslnnlknvlfifleklqvlrnyyshykyseespkpifetsllkn |
| >WP_004343973.1 | mylwfdanvrlykrdymhhenidmqrdfthlnrkkqvgrtkniidspnfhyhfadkegnm |
| (SEQ ID NO: 132) | tiagllffvslfldkkdaiwmqkklkgfkdgrnlreqmtnevfcrsrislpklklenvqt |
| | kdwmqldmlnelvrcpkslyerlrekdresflwpfdifsddynaeeepfkntivrhqdif |
| | pyfvlryfdlneifeqlrfqidlgtyhfsiynkrigdedevrhlthhlygfariqdfapq |
| | nqpeewrklvkdldhfetsqepyisktaphyhlenekigikfcsahnnlfpslqtdktcn |
| | grskfnlgtqftaeaflsvhellpmmfyyllltkdysrkesadkvegiirkeisniyaiy |
| | dafanneinsiadltrrlqntnilqghlpkqmisilkgrqkdmgkeaerkigemiddtqr |
| | rldllckqtnqkirigkrnagllksgkiadwlyndmmffqpvqkdqnnipinnskanste |
| | yrmlqralalfgsenfrlkayfnqmnlvgndnphpflaetqwehqtnilsfyrnyleark |
| | kylkglkpqnwkqyqhflilkvqktnintivtgwknsfnlprgiftqpirewfekhrmsk |
| | riydqilsfdivgfrakaiplyfaeeykdnvqpfydypfnignrlkpkkrqfldkkeive |
| | lwqknkelfknypsekkktdlayldflswkkferelrliknqdivtwlmfkelfnmatve |
| | glkigeihlrdidtntaneesnnilnrimpmldpvktyetdnkgnilkerplaffyieet |
| | etkvlkqgnfkalvkdrringlfsfaettdlnleehpisklsvdlelikyqttrisifem |
| | tlglekklidkystlptdsfrnmlerwlqckam-pelknyvnsliavrnafshnqypmyd |
| | atlfaevkkftlfpsvdtkkielniapqlleivgkaikeieksenkn |
| Prevotella buccae D17 | mqkqdklfvdrkknaifafpkyitimenqekpepiyyeltdkhfwaaflnlarhnvytti |
| (NZ_GG739967.1) | nhinrrleiaelkddgymmdikgswneqakkldkkvrlrdlimkhfpfleaaayeitnsk |
| >WP_004343581.1 | spnnkeqrekeqsealslnnlknvlfifleklqvlrnyyshykyseespkpifetsllkn |
| (SEQ ID NO: 133) | mylwfdanvrlykrdymhhenidmqrdfthlnrkkqvgrtkniidspnfhyhfadkegnm |
| | tiagllffvslfldkkdaiwmqkklkgfkdgrnlreqmtnevfcrsrislpklklenvqt |
| | kdwmqldmlnelvrcpkslyerlrekdresflwpfdifsddydaeeepfkntivrhqdif |
| | pyfvlryfdlneifeqlrfqidlgtyhfsiynkrigdedevrhlthhlygfariqdfaqq |
| | nqpevwrklykdldyfeasqepyipktaphyhlenekigikfcsthnnlfpslktektcn |
| | grskfnlgtqftaeaflsvhellpmmfyyllltkdysrkesadkvegiirkeisniyaiy |
| | dafangeinsiadltcrlqktnilqghlpkqmisilegrqkdmekeaerkigemiddtqr |
| | rldllckqtnqkirigkrnagllksgkiadwlyndmmffqpvqkdqnnipinnskanste |
| | yrmlqralalfgsenfrlkayfnqmnlvgndnphpflaetqwehqtnilsfyrnyleark |
| | kylkglkpqnwkqyqhflilkvqktnintivtgwknsfnlprgiftqpirewfekhrmsk |
| | riydqilsfdivgfvakaiplyfaeeykdnvqpfydypfnignklkpqkgqfldkkerve |
| | lwqknkelfknypsekkktdlayldflswkkferelrliknqdivtwlmfkelfnmatve |
| | glkigeihlrdidtntaneesnnilnrimpmklpvktyetdnkgnilkerplatfyieet |
| | etkvlkqgnflcvlakdrdngllsfaettdidleknpitklsvdhelikyqttrisifem |
| | tlglekklinkyptlptdsfrnmlerwlqckanrpelknyvnsliavrnafshnqypmyd |
| | atlfaevkkftlfpsvdtkkielniapqlleivgkaikeieksenkn |
| Prevotella sp. MSX73 | mqkqdklfvdrkknaifafpkyitimenqekpepiyyeltdkhfwaaflnlarhnvytti |
| (NZ_ALJQ01000043.1) | nhinrrleiaelkddgymmgikgswneqakkldkkvrlrdlimkhfpfleaaayeitnsk |
| >WP_007412163.1 | spnnkeqrekeqsealslnnlknvlfifleklqvlrnyyshykyseespkpifetsllkn |
| (SEQ ID NO: 134) | mykvfdanvrlvkrdymhhenidmqrdfthlnrkkqvgrtkniidspnfhyhfadkegnm |
| | tiagllffvslfldkkdaiwmqkklkgfkdgrnlreqmtnevfcrsrislpklklenvqt |
| | kdwmqldmlnelvrcpkslyerlrekdresfkvpfdifsddydaeeepflmtivrhqdrf |
| | pyfvlryfdlneifeqlrfqidlgtyhfsiynkrigdedevrhlthhlygfariqdfapq |
| | nqpeewrklykdldhfetsqepyisktaphyhlenekigikfcsthnnlfpslkrektcn |
| | grskfnlgtqftaeaflsvhellpmmfyyllltkdysrkesadkvegiirkeisniyaiy |
| | dafanneinsiadltcrlqktnilqghlpkqmisilegrqkdmekeaerkigemiddtqr |
| | rldllckqtnqkirigkrnagllksgkiadwlvsdmmrfqpvqkdtnnapinnskanste |
| | yrmlqhalalfgsessrlkayfrqmnlvgnanphpflaetqwehqtnilsfyrnyleark |
| | kylkglkpqnwkqyqhflilkvqktnrntivtgwknsfnlprgiftqpirewfekhrmsk |
| | riydqilsfdrvgfvakaiplyfaeeykdnvqpfydypfnignklkpqkgqfldkkerve |
| | lwqknkelfknypseknktdlayldflswkkferelrliknqdivtwlmfkelfktttve |
| | glkigeihlrdidtntaneesnnilnrimpmklpvktyetdnkgnilkerplatfyieet |
| | etkvlkqgnflcvlakdrdngllsfaettdidleknpitklsvdyelikyqttrisifem |
| | tlglekklidkystlptdsfrnmlerwlqckanrpelknyvnsliavrnafshnqypmyd |
| | atlfaevkkftlfpsvdtkkielniapqlleivgkaikeieksenkn |
| Prevotella pallens ATCC | mkeeekgktpvvstynkddkhfwaaflnlarhnvyitvnhinkilgegeinrdgyentle |
| 700821 | kswneikdinkkdrlskliikhfpflevttyqrnsadttkqkeekqaeaqsleslkksff |
| (AFPY01000052.1) | vfiyklrdlrnhyshykhskslerpkfeedlqekmynifdasiqlvkedykhntdiktee |
| >EGQ18444.1 | dfkhldrkgqfkysfadnegnitesgllffvslflekkdaiwvqkklegfkcsnesyqkm |
| (SEQ ID NO: 135) | tnevfcrsrmllpklrlqstqtqdwilldmlnelircpkslyerlreedrkkfrvpieia |
| | dedydaeqepfknalvrhqthfpyfallyfdyneiftnlifqidlgtyhfsiykkqigdy |
| | keshhlthklygferiqeftkqnrpdewrkivktfnsfetskepyipettphyhlenqki |
| | giffindndkiwpslktnseknekskykldksfqaeaflsvhellpmmfyylllktentd |
| | ndneietkkkenkndkqekhkieeiienkiteiyalydafangkinsidkleeyckgkdi |
| | eighlpkqmiailksehkdmateakrkqeemladvqkslesldnqineeienverknssl |
| | ksgeiaswlvndmmrfqpvqkdnegnplnnskansteyqmlqrslalynkeekptryfrq |
| | vnliessnphpflnntewekcnnilsfyrsyleakknfleslkpedweknqyflmlkepk |
| | tncetivqgwkngfnlprgiftepirkwfmehrknitvaelkrvglvakviplffseeyk |
| | dsvqpfynylfnvgninkpdeknflnceerrellrkkkdefkkmtdkekeenpsylefqs |
| | wnkferelrlvrnqdivtwllcmelfnkkkikelnvekiylknintnttkkeknteekng |
| | eekiikeknnilnrimpmrlpikvygrenfsknkkkkirrntfftvyieekgtkllkqgn |
| | fkalerdrrlgglfsfvkthskaesksntisksrveyelgeyqkarieiikdmlaleetl |
| | idkynsldtdnfhnmltgwlklkdepdkasfqndvdlliavrnafshnqypmrnriafan |
| | inpfslssantseekglgianqlkdkthktiekiieiekpietke |
| Prevotella pallens ATCC | mkeeekgktpvvstynkddkhfwaaflnlarhnvyitvnhinkilgegeinrdgyentle |
| 700821 | kswneikdinkkdrlskliikhfpflevttyqrnsadttkqkeekqaeaqsleslkksff |
| (NZ_GL982513.1) | vfiyklrdlrnhyshykhskslerpkfeedlqekmynifdasiqlvkedykhntdiktee |
| >WP_006044833.1 | dfkhldrkgqfkysfadnegnitesgllffvslflekkdaiwvqkklegfkcsnesyqkm |
| (SEQ ID NO: 136) | tnevfcrsrmllpklrlqstqtqdwilldmlnelircpkslyerlreedrkkfrvpieia |
| | dedydaeqepfknalvrhqthfpyfallyfdyneiftnlifqidlgtyhfsiykkqigdy |
| | keshhlthklygferiqeftkqnrpdewrkivktfnsfetskepyipettphyhlenqki |
| | giffindndkiwpslktnseknekskykldksfqaeaflsvhellpmmfyylllktentd |
| | ndneietkkkenkndkqekhkieeiienkiteiyalydafangkinsidkleeyckgkdi |
| | eighlpkqmiailksehkdmateakrkqeemladvqkslesldnqineeienverknssl |
| | ksgeiaswlvndmmrfqpvqkdnegnplnnskansteyqmlqrslalynkeekptryfrq |
| | vnliessnphpflnntewekcnnilsfyrsyleakknfleslkpedweknqyflmlkepk |
| | tncetivqgwkngfnlprgiftepirkwfmehrknitvaelkrvglvakviplffseeyk |
| | dsvqpfynylfnvgnlnkpdeknflnceerrellrkkkdefkkmtdkekeenpsylefqs |
| | wnkferelrlvrnqdivtwllcmelfnkkkikelnvekiylknintnttkkeknteekng |
| | eekiikeknnilnrimpmrlpikyygrenfsknkkkkirrntfftvyieekgtkllkqgn |
| | fkalerdrrlgglfsfvkthskaesksntisksrveyelgeyqkarieiikdmlaleetl |
| | idkynsldtdnfhnmltgwlklkdepdkasfqndvdlliavrnafshnqypmrnriafan |
| | inpfslssantseekglgianqlkdkthktiekiieiekpietke |
| Prevotella intermedia | meddkkttdsiryelkdkhfwaaflnlarhnvyitvnhinkileegeinrdgyettlknt |
| ATCC 25611 = DSM | wneikdinkkdrlskliikhfpfleaatyrinptdttkqkeekqaeaqsleslrksffvf |
| 20706 | iyklrdlmhyshykhskslerpkfeegllekmynifnasirlykedyclynkdinpdedf |
| (NZ_JAEZ01000017.1) | khldrteeefnyyftkdnegnitesgllffvslflekkdaiwmqqklrgfkdnrenkkkm |
| >WP_036860899.1 | tnevfcrsrmllpklrlqstqtqdwilldmlnelircpkslyerlreedrekfrvpieia |
| (SEQ ID NO: 137) | dedydaeqepfkntlvrhqdrfpyfalryfdyneiftnlrfqidlgtyhfsiykkqigdy |
| | keshhlthklygferiqeftkqnrpdewrkivktfnsfetskepyipettphyhlenqki |
| | giffindndkiwpslktnseknekskykldksfqaeaflsvhellpmmfyylllktentd |
| | ndneietkkkenkndkqekhkieeiienkiteiyalydlfangeiksideleeyckgkdi |
| | eighlpkqmiailkdehkvmateaerkqeemlvdvqkslesldnqineeienverknssl |
| | ksgkiaswlyndmmrfqpvqkdnegkpinnskansteyqllqrtlaffgseherlapyfk |
| | qtkliessnphpflkdtewekcnnilsfyrsyleakknfleslkpedweknqyflklkep |
| | ktkpktivqgwkngfnlprgiftepirkwfmkhrenitvaelkrvglvakviplffseey |
| | kdsvqpfynyhfnvgninkpdeknflnceerrellrkkkdefkkmtdkekeenpsylefk |
| | swnkferelrlvrnqdivtwllcmelfnkkkikelnvekiylknintnttkkeknteekn |
| | geeknikeknnilnrimpmrlpikvygrenfsknkkkkirrnifftvyieekgtkllkqg |
| | nfkalerdrrlgglfsfvktpskaesksntisklrveyelgeyqkarieiikdmlalekt |
| | lidkynsldtdnfnkmlidwlelkgepdkasfqndvdlliavrnafshnqypmrnriafa |
| | ninpfslssantseekglgianqlkdkthktiekiieiekpietke |
| Prevotella intermedia | meddkkttdsiryelkdkhfwaaflnlarhnvyitvnhinkileedeinrdgyentlens |
| (NZ_LBGT01000010.1) | wneikdinkkdrlskliikhfpfleattyrqnptdttkqkeekqaeaqsleslkksffvf |
| >WP_061868553.1 | iyklrdlmhyshykhskslerpkfeedlqnkmynifdvsiqfvkedykhntdinplckdf |
| (SEQ ID NO: 138) | khldrkrkgkfhysfadnegnitesgllfivslflekkdaiwvqkklegfkcsnksyqkm |
| | tnevfcrsrmllpklrlestqtqdwilldmlnelircpkslyerlqgvnrkkfyvsfdpa |
| | dedydaeqepfkntivrhqdrfpyfalryfdynevfanlrfqidlgtyhfsiykkliggq |
| | kedrhlthklygferiqefdkqnrpdewkaivkdsdlfkkkeekeeekpyisettphyhl |
| | enkkigiafknhniwpstqteltnnkrkkynlgtsikaeaflsvhellpmmfyylllkte |
| | ntkndnkvggkketkkqgkhkieaiieskikdiyalydafangeinsedelkeylkgkdi |
| | kivhlpkqmiailknehkdmaekaeakqekmklatenrlktldkqlkgkiqngklynsap |
| | ksgeiaswlyndmmrfqpvqkdengeslnnskansteyqllqrtlaffgseherlapyfk |
| | qtkliessnphpflndtewekcsnilsfyrsylkarknfleslkpedweknqyflmlkep |
| | ktnretlvqgwkngfnlprgiftepirkwfmehwksikvddlkrvglvakvtplffseky |
| | kdsvqpfynypfnvgdvnkpkeedflhreerielwdkkkdkfkgykakkkikemtdkeke |
| | ehrsylefqswnkferelrlvrnqdivtwllctelidklkidelnikelkklrlkdintd |
| | takkeknnilm-vmpmelpvtvykynkggyiiknkplhtiyikeaetkllkqgnfkalvk |
| | dn-lnglfsfvktpseaesesnpisklrveyelgkyqnarldiiedmlalekklidkyns |
| | ldtdnfhnmltgwlelkgeakkarfqndvklltavrnafshnqypmydenlfgnielfsl |
| | sssniieskgldiaaklkeevskaakkigneednkkeket |
| Prevotella intermedia 17 | mkmeddkktkestnmldnkhfwaaflnlarhmiyitvnhinkvlelknkkdqdiiidndq |
| (CP003502.1) | dilaikthwekvngdlnkterlrelmtkhfpfletaiytknkedkeevkqekqakaqsfd |
| >AFJ07523.1 | slkhclflfleklqearnyyshykysestkepmlekellkkmynifddniqlvikdyqhn |
| (SEQ ID NO: 139) | kdinpdedfkhldrteeefnyyfttnkkgnitasgllffvslflekkdaiwmqqklrgfk |
| | dnreskkkmthevfcrsrmllpklflestqtqdwilldmlnelircpkslyerlqgeyrk |
| | kfnvpfdsadedydaeqepfkntivrhqdrfpyfalryfdyneiftnlrfqidlgtyhfs |
| | iykkliggqkedrhlthklygferiqefakqnrtdewkaivkdfdtyetseepyisetap |
| | hyhlenqkigirfrndndeiwpslktngennekrkykldkqyqaeaflsvhellpmmfyy |
| | lllkkeepnndkknasivegfikreirdiyklydafangeinniddlekycedkgipkrh |
| | lpkqmvailydehkdmaeeakrkqkemvkdtkkllatlekqtqgeiedggrnirllksge |
| | iarwlvndmmrfqpvqkdnegnpinnskansteyqmlqrslalynkeekptlyfrqvnli |
| | nssnphpflkwtkweecnnilsfyrsylikkieflnklkpedweknqyflklkepktnre |
| | tivqgwkngfnlprgiftepirewfkrhqndseeyekvetldrvglvtkviplffkkeds |
| | kdkeeylkkdaqkeinncvqpfygfpynvgnihkpdekdflpseerkklwgdkkykfkgy |
| | kakvkskkltdkekeeyrsylefqswnkferelrlvrnqdivtwllctelidklkvegln |
| | veelkklrlkdidtdtakqeknnilnrvmpmqlpvtvyeiddshnivkdrplhtvyieet |
| | ktkllkqgnfkalvkdrflnglfsfvdtssetelksnpiskslveyelgeyqnarietik |
| | dmilleetliekyktlptdnfsdmingwlegkdeadkarfqndvkllvavrnafshnqyp |
| | mrnriafaninpfslssadtseekkldianqlkdkthkiikriieiekpietke |
| Prevotella intermedia | meddkktkestnmldnkhfwaaflnlarhnvyitvnhinkvlelknkkdqdiiidndqdi |
| (NZ_AP014926.1) | laikthwekvngdlnkterlrelmtkhfpfletaiytknkedkeevkqekqakaqsfdsl |
| >WP_050955369.1 | khclflfleklqearnyyshykysestkepmlekellkkmynifddniqlvikdyqhnkd |
| (SEQ ID NO: 140) | inpdedfkhldrteeefnyyfttnkkgnitasgllffvslflekkdaiwmqqklrgfkdn |
| COMMENT | reskkkmthevfcrsrmllpklrlestqtqdwilldmlnelircpkslyerlqgeyrkki |
| REF SEQ: This record | nvpfdsadedydaeqepfkntivrhqdifpyfalryfdyneiftnlifqidlgtyhfsiy |
| represents a single, non- | kkliggqkedrhlthklygferiqefakqnrtdewkaivkdfdtyetseepyisetaphy |
| redundant, protein | hlenqkigirfindndeiwpslktngennekrkykldkqyqaeaflsvhellpmmfyyll |
| sequence which may be | lkkeepnndkknasivegfikreirdiyklydafangeinniddlekycedkgipkrhlp |
| annotated on many | kqmvailydehkdmaeeakrkqkemvkdtkkllatlekqtqgeiedgginirllksgeia |
| different RefSeq | rwlyndmmrfqpvqkdnegnpinnskansteyqmlqrslalynkeekptryfrqvnlins |
| genomes from the same, | snphpflkwtkweecnnilsfyrsyltkkieflnklkpedweknqyflklkepktnretl |
| or different, species | vqgwkngfnlprgiftepirewfkrhqndseeyekvetldrvglvtkviplffkkedskd |
| (suppressed in databse) | keeylkkdaqkeinncvqpfygfpynvgnihkpdekdflpseerkklwgdkkykfkgyka |
| | kvkskkltdkekeeyrsylefqswnkferelrlvinqdivtwllctelidklkveglnve |
| | elkklrlkdidtdtakqeknnilnrvmpmqlpvtvyeiddshnivkdrplhtvyieetkt |
| | kllkqgnfkalvkdrrlnglfsfvdtssetelksnpiskslveyelgeyqnarietikdm |
| | llleetliekyktlptdnfsdmlngwlegkdeadkarfqndvkllvavinafshnqypmr |
| | nriafaninpfslssadtseekkldianqlkdkthkiikriieiekpietke |
| Prevotella intermedia | meddkkttdsisyelkdkhfwaaflnlarhnvyitvnhinkvlelknkkdqdiiidndqd |
| (AP014598.1) | ilaikthwekvngdlnkterlrelmtkhfpfletaiysknkedkeevkqekqakaqsfds |
| BAU18623.1 | lkhclflfleklqetrnyyshykysestkepmlekellkkmynifddniqlvikdyqhnk |
| (SEQ ID NO: 141) | dinpdedfkhldrteedfnyyftrnkkgnitesgllffvslflekkdaiwmqqklrgfkd |
| | nreskkkmthevfcrsrmllpklrlestqtqdwilldmlnelircpkslyerlqgedrek |
| | fkvpfdpadedydaeqepfkntlvrhqdrfpyfalryfdyneiftnlifqidlgtfhfsi |
| | ykkliggqkedrhlthklygferiqefakqnrpdewkaivkdldtyetsneiyisettph |
| | yhlenqkigirfrndndeiwpslktngennekskykldkqyqaeaflsvhellpmmfyyl |
| | llkkeepnndkknasivegfikreirdmyklydafangeinniddlekycedkgipkrhl |
| | pkqmvailydehkdmvkeakrkqrkmvkdtekllaalekqtqektedgginirllksgei |
| | arwlvndmmifqpvqkdnegnpinnskansteyqmlqrslalynkeekptryfrqvnlin |
| | ssnphpflkwtkweecnnilsfyrsyltkkieflnklkpedwekneflklkepktriret |
| | lvqgwkngfnlprgiftepirewfkrhqndskeyekvealdryglvtkviplffkkedsk |
| | dkeedlkkdaqkeinncvqpfysfpynvgnihkpdekdflhreerielwdkkkdkfkgyk |
| | akvkskkltdkekeeyrsylefqswnkferelrlvrnqdivtwllctelidklkveglnv |
| | eelkklrlkdidtdtakqeknnilnrvmpmqlpvtvyeiddshnivkdrplhtvyieetk |
| | tkllkqgnfkalvkdrrlnglfsfvdtsseaelksnpiskslveyelgeyqnarietikd |
| | milleetliekyknlptdnfsdmlngwlegkdeadkarfqndvkllvavinafshnqypm |
| | rnriafaninpfslssadtseekkldianqlkdkthkiikriieiekpietke |
| Prevotella intermedia ZT | mkmeddkkttestnmldnkhfwaaflnlarhnvyitvnhinkvlelknkkdqdiiidndq |
| (ATMK01000017.1) | dilaikthwekvngdlnkterlrelmtkhfpfletaiytknkedkeevkqekqaeaqsle |
| >KJJ86756.1 | slkdclflfleklqearnyyshykysestkepmleegllekmynifddniqlvikdyqhn |
| (SEQ ID NO: 142) | kdinpdedflchldrkgqfkysfadnegnitesgllffvslflekkdaiwmqqkhgfkdn |
| | reskkkmthevfcrrrmllpklrlestqtqdwilldmlnelircpkslyerlqgeyrkkf |
| | nvpfdsadedydaeqepfkntivrhqdifpyfalryfdyneiftnlifqidlgtyhfsiy |
| | kkliggqkedrhlthklygferiqefakqnrpdewkalvkdldtyetsneryisettphy |
| | hlenqkigirfingnkeiwpslktngennekskykldkpyqaeaflsvhellpmmfyyll |
| | lkkeepnndkknasivegfikreirdmyklydafangeinnigdlekycedkgipkrhlp |
| | kqmvailydepkdmvkeakrkqkemvkdtkkllatlekqtqeeiedgginirllksgeia |
| | rwlyndmmifqpvqkdnegnpinnskansteyqmlqrslalynkeekptiyfrqvnlins |
| | snphpflkwacweecnnilsfyinyltkkieflnklkpedweknqyflklkepktnretl |
| | vqgwkngfnlprgiftepirewfkrhqndskeyekvealkrvglvtkviplffkeeyfke |
| | daqkeinncvqpfysfpynvgnihkpdekdflpseerkldwgdkkdkfkgykakvkskkl |
| | tdkekeeyrsylefqswnkferelrlvrnqdivtwllctelidkmkveglnveelqklrl |
| | kdidtdtakqeknnilm-impmqlpvtvyeiddshnivkdrplhtvyieetktkllkqgn |
| | fkalvkdrrlnglfsfvdtsskaelkdkpisksvveyelgeyqnarietikdmillektl |
| | ikkyeklptdnfsdmlngwlegkdesdkarfqndvkllvavinafshnqypmnifiafan |
| | inpfslssadiseekkldianqlkdkthkiikkiieiekpietke |
| Prevotella aurantiaca | meddkkttgsisyelkdkhfwaaflnlarhnvyitinhinklleireidndekvldiktl |
| JCM 15754 | wqkgnkdlnqkarlrelmtkhfpfletaiytknkedkkevkqekqaeaqsleslkdclfl |
| (NZ_BAKF01000019.1) | fldldqearnyyshykysefskepefeegllekmynifgnniqlvindyqhnkdinpded |
| >WP_025000926.1 | fkhldrkgqfkysfadnegnitesgllffvslflekkdaiwmqqklngfkdnlenkkkmt |
| (SEQ ID NO: 143) | hevfcrsrilmpklrlestqtqdwilldmlnelircpkslyerlqgddreldkvpfdpad |
| | edynaeqepfkntlirhqdifpyfvlryfdyneifknlifqidlgtyhfsiykkliggqk |
| | edrhlthklygferiqefakqm-pdewkaivkdldtyetsnkiyisettphyhlenqkig |
| | irfingnkeiwpslktndennekskykldkqyqaeaflsvhellpmmfyylllkkekpnn |
| | deinasivegfikreirnifklydafangeinniddlekycadkgipkrhlpkqmvaily |
| | dehkdmvkeakrkqkemvkdtkkllatlekqtqkekeddgrnvkllksgeiarwlvndmm |
| | rfqpvqkdnegkpinnskansteyqmlqrslalynneekptryfrqvnliesnnphpflk |
| | wtkweecnnillfyysylikkieflnklkpedwklmqyflklkepktnretivqgwkngf |
| | nlprgiftepirewfkrhqnnskeyekvealdrvglvtkviplffkeeyfkdkeenfked |
| | tqkeindcvqpfynfpynvgnihkpkekdflhreerielwdkkkdkfkgykekikskklt |
| | ekdkeefrsylefqswnkferelrlvrnqdivtwllckelidklkidelnieelkkftln |
| | nidtdtakkeknnilnrvmpmelpvtvyeiddshkivkdkplhtiyikeaetkllkqgnf |
| | kalvkdrrlnglfsfvktnseaeskrnpisklrveyelgeyqearieliqdmlaleekli |
| | nkykdlptnkfsemlnswlegkdeadkarfqndvdfliavrnafshnqypmhnkiefani |
| | kpfslytannseekglgianqlkdktkettdkikkiekpietke |
| Prevotella pleuritidis | mendkrleesacytlndkhfwaaflnlarhnvyitvnhinktlelknkknqeiiidndqd |
| F0068 | ilaikthwakvngdlnktdrlrelmikhfpfleaaiysnnkedkeevkeekqakaqsfks |
| (NZ_AWET01000045.1) | lkdclflfleklqearnyyshykysesskepefeegllekmyntfdasirlvkedyqynk |
| >WP_021584635.1 | didpekdfkhlerkedfnylftdkdnkgkitkngllffvslflekkdaiwmqqkfrglkd |
| (SEQ ID NO: 144) | nrgnkekmthevfcrsrmllpkirlestqtqdwilldmlnelircpkslyerlqgayrek |
| COMMENT | fkvpfdsidedydaeqepfrntlvrhqdrfpyfalryfdyneifknlrfqidlgtyhfsi |
| REF SEQ: This record | ykkliggkkedrhlthklygferiqeftkqnrpdkwqaiikdldtyetsnelyisettph |
| represents a single, non- | yhlenqkigirfrndnndiwpslktngeknekskynldkpyqaeaffsvhellpmmfyyl |
| redundant, protein | llkmentdndkednevgtkkkgnknnkqekhkieeiienkikdiyalydaftngeinsid |
| sequence which may be | elaegregkdieighlpkqlivilknkskdmaekanrkqkemikdtkkrlatldkqvkge |
| annotated on many | iedggrnirllksgeiarwlyndmmrfqpvqkdnegkpinnskansteyqmlqrslalyn |
| different RefSeq | keekptryfrqvnlikssnphpfledtkweecynilsfyrnylkakikflnklkpedwkk |
| genomes from the same, | nqyflmlkepktnrktivqgwkngfnlprgiftepikewfkrhqndseeykkvealdrvg |
| or different, species | lvakviplffkeeyfkedaqkeinncvqpfysfpynvgnihkpeeknflhceerrklwdk |
| (suppressed in databse) | kkdkfkgykakekskkmtdkekeehrsylefqswnkferelrlvrnqdiftwllctklid |
| | klkidelnieelqklrlkdidtdtakkeknnilnrvmpmrlpvtvyeidksfnivkdkpl |
| | htvyieetgtkllkqgnfkalvkdrrlnglfsfvktsseaeskskpisklrveyelgayq |
| | karidiikdmlalektlidndenlptnkfsdmlkswlkgkgeankarlqndvgllvavrn |
| | afshnqypmynsevfkgmkllslssdipekeglgiakqlkdkiketieriieiekeirn |
| Prevotella pleuritidis | mendkrleestcyandlchfwaaflnlarhnvyitinhinklleirqidndekvldikal |
| JCM 14110 | wqkvdkdinqkarlrelmikhfpfleaaiysnnkedkeevkeekqakaqsfkslkdclfl |
| (NZ_BAJN01000005.1) | fleklqearnyyshykssesskepefeegllekmyntfgvsirlvkedyqynkdidpekd |
| >WP_036931485.1 | fkhlerkedfnylftdkdnkgkitkngllffvslflekkdaiwmqqklrgfkdnrgnkek |
| (SEQ ID NO: 145) | mthevfcrsrmllpkirlestqtqdwilldmlnelircpkslyerlqgayrekftwpfds |
| COMMENT | idedydaeqepfrntlvrhqdrfpyfalryfdyneifknlrfqidlgtyhfsiykkligd |
| REF SEQ: This record | nkedrhlthklygferiqefakqkrpnewqalvkdldiyetsneqyisettphyhlenqk |
| represents a single, non- | igirfknkkdkiwpsletngkenekskynldksfqaeaflsihellpmmfydlllkkeep |
| redundant, protein | nndeknasivegfikkeikrmyaiydafaneeinskegleeycknkgfqerhlpkqmiai |
| sequence which may be | ltnksknmaekakrkqkemikdtkkrlatldkqvkgeiedggrnirllksgeiarwlynd |
| annotated on many | mmrfqsvqkdkegkpinnskansteyqmlqrslalynkeqkptpyfiqvnlikssnphpf |
| different RefSeq | leetkweecnnilsfyrsyleakknfleslkpedwkknqyflmlkepktnrktivqgwkn |
| genomes from the same, | gfnlprgiftepikewfkrhqndseeykkvealdrvglvakviplffkeeyfkedaqkei |
| or different, species | nncvqpfysfpynvgnihkpeeknflhceerrklwdkkkdkfkgykakekskkmtdkeke |
| (suppressed in databse) | ehrsylefqswnkferelrlvrnqdivtwllctelidklkidelnieelqkftlkdidtd |
| | takkeknnilnrimpmqlpvtvyeidksfnivkdkplhtiyieetgtkllkqgnfkalvk |
| | drrlnglfsfvktsseaeskskpisklrveyelgayqkaridiikdmlalektlidnden |
| | lptnkfsdmlkswlkgkgeankarlqndvdllvairnafshnqypmynsevfkgmkllsl |
| | ssdipekeglgiakqlkdkiketierheiekeirn |
| Prevotella falsenii DSM | mkndnnstkstdyngdlchfwaaflnlarhnvyitvnhinkvlelknkkdqeiiidndqd |
| 22864 = JCM 15124 | ilaiktlwgkvdtdinkkdrlrelimkhfpfleaatyqqsstnntkqkeeeqakaqsfes |
| (NZ_BAJY01000004.1) | lkdclflfleklrearnyyshykhsksleepkleekllenmynifdtnvqlvikdyehnk |
| >WP_036884929.1 | dinpeedfkhlgraegefnyyftrnkkgnitesgllffvslflekkdaiwaqtkikgfkd |
| (SEQ ID NO: 146) | nrenkqkmthevfcrsrmllpklrlestqtqdwilldmlnelircpkslykrlqgekrek |
| | frvpfdpadedydaeqepflntlvrhqdrfpyfalryfdyneiftnlifqidlgtyhfsi |
| | ykkqigdkkedrhlthklygferiqefakenrpdewkalvkdldtfeesnepyisettph |
| | yhlenqkigimknkkkkktiwpsletkttvnerskynlgksfkaeaflsvhellpnmify |
| | ylllnkeepnngkinaskvegiiekkirdiyklygafaneeinneeelkeycegkdiair |
| | hlpkqmiailkneykdmakkaedkqkkmikdtkkrlaaldkqvkgevedggrnikplksg |
| | riaswlyndmmrfqpvqrdrdgypinnskansteyqllqrtlalfgsererlapyfrqmn |
| | ligkdnphpflkdtkwkehnnilsfyrsyleakknflgslkpedwkknqyflklkepktn |
| | retlvqgwkngfnlprgiftepirewfirhqneseeykkvkdfdriglvakviplffked |
| | yqkeiedyvqpfygypfnvgnihnsqegtflnkkereelwkgnktkfkdyktkeknkekt |
| | nkdkfkkktdeekeefrsyldfqswkkferelrlvrnqdivtwllcmelidklkidelni |
| | eelqklrlkdidtdtakkeknnilnrimpmelpvtvyetddsnniikdkplhtiyikeae |
| | tkllkqgnfkalvkdrringlfsfvetsseaelkskpisksiveyelgeyqrarveiikd |
| | mlrleetligndeklptnkfrqmldkwlehkketddtdlkndvklltevrnafshnqypm |
| | rdriafanikpfslssantsneeglgiakklkdktketidriieieeqtatkr |
| Porphyromonas gulae | mteqserpyngtyytledkhfwaafinlarhnayitithidrqlayskaditndqdvisf |
| (NZ_JRAT01000012.1) | kalwknldndlerksrlrslilkhfsflegaaygkklfeskssgnkssknkeltkkekee |
| >WP_039418912.1 | lqanalsldnlksilfdflqklkdfrnyyshyrhsgsselplfdgnmlqrlynvfdvsyq |
| (SEQ ID NO: 147) | rvkrdhehndkvdphrhfnhlvrkgkkdryghndnpsfkhhfvdsegmvteagliffvsl |
| | flekrdaiwmqkkirgfkggtetyqqmtnevfcrsrislpklkleslrmddwmlldmlne |
| | lvrcpkplydrlreddracfrvpvdilpdeddtdgggedpfkntlvrhqdrfpyfallyf |
| | dikkvftslrfhidlgtyhfaiykkmigeqpedrhltrnlygfgriqdfaeehrpeewkr |
| | lvrdldyfetgdkpyisqtsphyhiekgkiglrfmpegqhlwpspevgttrtgrskyaqd |
| | krltaeaftsvheimpmmfyyflirekyseevsaekvqgrikrviedvyaiydafardei |
| | ntlkeldacladkgirrghlpkqmiailsqehlmmeekvrkklqemiadtdhrldmldrq |
| | tdrkirigrknaglpksgviadwlvrdmmrfqpvakdasgkpinnskansteyrmiqral |
| | alfggekerltpyfrqmnitggnnphpflhdtrweshtnilsfyrsylrarkaflerigr |
| | sdrmenrpfllikepktdrqfivagwksefhlprgifteavrdcliemgydevgsyrevg |
| | fmakavplyferacedrvqpfydspfnvgnsikpkkgrfiskeeraeewergkerfrdle |
| | awshsaarriedafagieyaspgnkkkieqllrdislweafeskikvradkinlakikke |
| | ileaqehpyhdfkswqkferelrlvknqdiitwmmcrdimeenkvegidtgtlylkdirt |
| | nvqeqgslnvlnhvkpmrlpvvvyradsrghvhkeeaplatvyieerdtkllkqgnfksf |
| | vkdrrlnglfsfvdtgglameqypiskirveyelakyqtarvcafeqfieleesiltryp |
| | hlpdknfrkmleswsdpllakwpelhglwriliavrnafshnqypmydeavfssirkydp |
| | sspdaieermginiahriseevkqaketveriiqa |
| Porphyromonas sp. | mteqserpyngtyytledkhfwaafinlarhnayitithidrqlayskaditndqdvisf |
| COT-052 OH4946 | kalwknfdndlerksrlrslilkhfsflegaaygkklfeskssgnkssknkeltkkekee |
| (NZ_JQZY01000014.1) | lqanalsldnlksilfdflqklkdfrnyyshyrhsesselplfdgnmlqrlynvfdvsvq |
| >WP_039428968.1 | wkrdhehndkvdphrhfnhlvrkgkkdryghndnpsfichhfvdsegmvteagliffvsl |
| (SEQ ID NO: 148) | flekrdaiwmqkkirgfkggtetyqqmtnevfcrsrisipkiklesirtddwmildmine |
| | lvrcpkplydrlreddracfrvpvdilpdeddtdgggedpfkntlvrhqdrfpyfallyf |
| | dikkvftslifhidlgtyhfaiykkmigeqpedrhltrnlygfgriqdfaeehrpeewkr |
| | lvrdldyfetgdkpyisqttphyhiekgkiglrfvpegqhlwpspevgttrtgrskyaqd |
| | krltaeaftsvheimpmmfyyflirekyseevsaekvqgrikrviedvyaiydafardei |
| | ntlkeldacladkgirrghlpkqmigilsgerkdmeekvrkklqemiadtdhrldmldrq |
| | tdrkirigrknaglpksgviadwlvrdmmrfqpvakdtsgkpinnskansteyrmiqral |
| | alfggekerltpyfrqmnliggnnphpflhetrweshtnilsfyrsylrarkaflerigr |
| | sdrvencpfifikepktdrqtivagwkgefhiprgifteavrdcliemgydevgsyrevg |
| | fmakavplyferacedrvqpfydspfnvgnsikpkkgrfiskedraeewergkelfrdle |
| | awshsaarrikdafagieyaspgnkkkieqllrdislweafeskikvradkinlakikke |
| | ileaqehpyhdfkswqkferelrlvknqdiitwmmcrdlmeenkvegldtgtlylkdirp |
| | nvqeqgslnvlnrvkpmrlpvvvyradsrghvhkeeaplatvyieerdtkilkqgnfksf |
| | vkdrrlnglfsfvdtgglameqypisklrveyelakyqtarvcvfelltrleesllstyp |
| | hlpdesfremleswsdpllakwpelhgkvrlliavrnafshnqypmydeavfssirkydp |
| | sspdaieermginiahriseevkqaketveriiqa |
| Porphyromonas gulae | mteqserpyngtyytledkhfwaafinlarhnayitithidrqlayskaditndqdvisf |
| (NZ_JRFD01000046.1) | kalwknldndlerksrlrslilkhfsflegaaygkklfeskssgnkssknkeltkkekee |
| >WP_039442171.1 | lqanalsldnlksilfdflqklkdfrnyyshyrhsgsselplfdgnmlqrlynvfdvsyq |
| (SEQ ID NO: 149) | wkrdhehndkvdphyhfnhlvrkgkkchyghndnpsflchhfvdsegmvteagllffvsl |
| | flekrdaiwmqkkirgfkggtgpyeqmtnevfcrsrislpklklestrtddwmlldmlne |
| | lvrcpkplydrlrekdracfrvpvdilpdeddtdgggedpfkntlvrhqdrfpyfalryf |
| | dlkkvftslrfhidlgtyhfaiykkmigeqpedrhltrnlygfgriqdfaeehrpeewkr |
| | lvrdldyletgdkpyisqttphyhiekgkiglrfvpegqhlwpspevgttrtgrskcaqd |
| | krltaeaftsvheimpmmfyyflirekyseevsaekvqgrikrviedvyaiydafardei |
| | ntlkeldtcladkgirrghlpkqmitilsgerkdmkekirkklqemiadtdhrldmldrq |
| | tdrkirigrknaglpksgviadwlvrdmmrfqpvakdasgkpinnskansteyrmiqral |
| | alfggekerltpyfrqmnitggnnphpflhetrweshtnilsfyrsylrarkaflerigr |
| | sdrvencpfifikepktdrqtivagwkdefhlprgifteavrdcliemgydevgsyrevg |
| | fmakavplyferacedrvqpfydspfnvgnsikpkkgifiskedraeewergmerfrdle |
| | awshsaarrikdafagieyaspgnkkkieqllrdislweafeskikvradkinlakikke |
| | ileaqehpyhdfkswqkferelrlvknqdiitwmmcrdlmeenkvegldtgtlylkdirp |
| | nvqeqgslnvlnrvkpmrlpvvvyradsrghvhkeaplatvyieerntkllkqgnfksfy |
| | kdrringlfsfvdtgglameqypiskirveyelakyqtarvcvfeltifieeslisryph |
| | lpdesfremleswsdpilakwpelhgkvffliavrnafshnqypmydeavfssirkydps |
| | spdaieermginiahriseevkqaketveriiqa |
| Porphyromonas gulae | mteqserpyngtyytledkhfwaafinlarhnayitithidrqlayskaditndqdvisf |
| (NZ_JRAJ01000010.1) | kalwknfdndlerksrlrslilkhfsflegaaygkklfeskssgnkssknkeltkkekee |
| >WP_039431778.1 | lqanalsldnlksilfdflqklkdfrnyyshyrhsesselplfdgnmlqrlynvfdvsvq |
| (SEQ ID NO: 150) | rvkrdhehndkvdphrhfnhlvrkgkkdryghndnpsfkhhfvdgegmyteagllffvsl |
| | flekrdaiwmqkkirgfkggtetyqqmtnevfcrsrisipkiklesirtddwmildmine |
| | lvrcpkplydrlreddracfrvpvdilpdeddtdgggedpfkntlvrhqdrfpyfallyf |
| | dlkkvftslrfhidlgtyhfaiykkmigeqpedrhltrnlygfgriqdfaeehrpeewkr |
| | lvrdldyfetgdkpyisqtsphyhiekgkiglrfmpegqhlwpspevgttrtgrskyaqd |
| | krltaeaftsvheimpmmfyyflirekyseevsaekvqgrikrviedvyaiydafardei |
| | ntlkeldacladkgirrghlpkqmiailsqehkdmeekirkklqemiadtdhrldmldrq |
| | tdrkirigrknaglpksgviadwlvrdmmrfqpvakdtsgkpinnskansteyrmiqral |
| | alfggekkrltpyfrqmnitggnnphpflhetrweshtnilsfyrsylrarkaflerigr |
| | sdrmenrpfllikepktdrqfivagwksefhlprgifteavrdcliemgydevgsyrevg |
| | fmakavplyferacedrvqpfydspfnvgnsikpkkgrflskeeraeewergkerfrdle |
| | awshsaarriedafagieyaspgnkkkieqllrdlslweafesklkvradkinlakikke |
| | ileaqehpyhdfkswqkferelrlvknqdiitwmmcrdlmeenkvegldtgtlylkdirp |
| | nvqeqgslnvlnrvkpmrlpvvvyradsrghvhkeeaplatvyieerdtkilkqgnfksf |
| | vkdrrlnglfsfvdtgglameqypiskirveyelakyqtarvcvfeltifieesilttyp |
| | hipdesfrkmleswsdpilakwpelhgkvffliavrnafshnqypmydeavfssirkydp |
| | sspdaieermginiahriseevkqaketveriiqv |
| Porphyromonas gulae | mteqserpyngtyytledkhfwaafinlarhnayitithidrqlayskaditndqdvisf |
| (NZ_KQ040500.1) | kalwknfdndlerksrlrslilkhfsflegaaygkklfeskssgnkssknkeltkkekee |
| >WP_046201018.1 | lqanalsldnlksilfdflqklkdfrnyyshyrhsesselplfdgnmlqrlynvfdvsvq |
| (SEQ ID NO: 151) | rvkrdhehndkvdphrhfnhlvrkgkkdryghndnpsfkhhfvdsegmyteagllffvsl |
| | flekrdaiwmqkkirgfkggtetyqqmtnevfcrsrisipkiklesirtddwmildmine |
| | lvrcpkplydrlrekdrarfrvpvdilpdeddtdgggedpfkntlvrhqdrfpyfalryf |
| | dlkkvftslrfhidlgtyhfaiykkmigeqpedrhlttnlygfgriqdfaeehrpeewkr |
| | lvrdldyfetgdkpyisqttphyhiekgkiglrfmpegqhlwpspevgttrtgrskyaqd |
| | krltaeaftsvheimpmmfyyflirekyseevsaekvqgrikrviedvyaiydafardei |
| | ntlkeldacladkgirrghlpkqmiailsqehkdmeekirkklqemiadtdhrldmldrq |
| | tdrkirigrknaglpksgviadwlvrdmmrfqpvakdtsgkpinnskansteyrmiqral |
| | alfggekkrltpyfrqmnitggnnphpflhetrweshtnilsfyrsylrarkaflerigr |
| | sdrmenrpfllikepktdrqfivagwksefhlprgifteavrdcliemgydevgsyrevg |
| | fmakavplyferacedrvqpfydspfnvgnsikpkkgifiskeeraeewergkelfrdle |
| | awshsaarriedafagieyaspgnkkkieqllrdislweafeskikvradkinlakikke |
| | ileaqehpyhdfkswqkferelrlvknqdiitwmmcrdlmeenkvegldtgtlylkdirp |
| | nvqeqgslnvlnrvkpmrlpvvvyradsrghvhkeeaplatvyieerdtkilkqgnfksf |
| | vkdrrlnglfsfvdtgglameqypiskirveyelakyqtarvcvfeltifieesilttyp |
| | hlpdesfrkmleswsdpilakwpelhgkvffliavrnafshnqypmydeavfssirkydp |
| | sspdaieermginiahriseevkqaketveriiqv |
| Porphyromonas gulae | mteqserpyngtyytledkhfwaafinlarhnayitithidrqlayskaditndqdvisf |
| (NZ_JRAL01000022.1) | kalwknfdndlerksrlrslilkhfsflegaaygkklfeskssgnkssknkeltkkekee |
| >WP_039434803.1 | lqanalsldnlksilfdflqklkdfrnyyshyrhsgsselplfdgnmlqrlynvfdvsvq |
| (SEQ ID NO: 152) | rvkidhehndevdphyhfnhlvrkgkkdryghndnpsfkhhfvdgegmvteagliffvsl |
| | flekrdaiwmqkkirgfkggtetyqqmtnevfcrsrislpklkleslrmddwmlldmlne |
| | lvrcpkplydrlreddracfrvpvdilpdeddtdgggedpfkntlvrhqdrfpyfallyf |
| | dlkkvftslrfhidlgtyhfaiykkmigeqpedrhltrnlygfgriqdfaeehrpeewkr |
| | lvrdldyfetgdkpyisqtsphyhiekgkiglrfmpegqhlwpspevgttrtgrskyaqd |
| | krltaeaflsvhelmpmmfyyfllrekyseevsaervqgrikrviedvyavydafardei |
| | ntrdeldacladkgirrghlprqmiailsqehkdmeekirkklqemmadtdhrldmldrq |
| | tdrkirigrknaglpksgviadwlvrdmmrfqpvakdasgkpinnskansteyrmiqral |
| | alfggekerltpyfrqmnitggnnphpflhetrweshtnilsfyrsylrarkaflerigr |
| | sdrvenrpflllkepktdrqflvagwkgefhiprgifteavrdcliemghdevasykevg |
| | fmakavplyferacedrvqpfydspfnvgnsikpkkgrflskeeraeewergkerfrdle |
| | awsysaarriedafagieyaspgnkkkieqllrdislweafeskikvradrinlakikke |
| | ileaqehpyhdfkswqkferelrlvknqdiitwmmcrdlmeenkvegldtgtlylkdirp |
| | nvqeqgslnvlnrvkpmrlpvvvyradsrghvhkeeaplatvyieerdtkilkqgnfksf |
| | vkdrrlnglfsfvdtgglameqypiskirveyelakyqtarvcvfeltifieesilttyp |
| | hipdesfremleswsdpilakwpelhgkvffliavrnafshnqypmydeavfssirkydp |
| | sspdaieermginiahriseevkqaketveriiqa |
| Porphyromonas gulae | mteqserpyngtyytledkhfwaaflnlarhnayitlthidrqlayskaditndqdvlsf |
| (NZ_JRAI01000002.1) | kalwknldndlerksrlrslilkhfsflegaaygkklfeskssgnkssknkeltkkekee |
| >WP_039419792.1 | lqanalsldnlksilfdflqklkdfrnyyshyrhsgsselplfdgnmlqrlynvfdvsyq |
| (SEQ ID NO: 153) | rvkrdhehndkvdphrhfnhlvrkgkkdryghndnpsfkhhfvdgegmvteagllffvsl |
| | flekrdaiwmqkkirgfkggtetyqqmtnevfcrsrislpklkleslrtddwmlldmlne |
| | lvrcpkplydrlrekdrarfrvpvdilpdeddtdgggedpfkntivrhqdifpyfalryf |
| | dlkkvftslrfhidlgtyhfaiykkvigeqpedrhltrnlygfgriqdfaeehrpeewkr |
| | lvrdldyfetgdkpyisqttphyhiekgkiglrfvpegqhlwpspevgttrtgrskyaqd |
| | krltaeaflsvhelmpmmfyyfllrekyseevsaekvqgrikrviedvyaiydafardei |
| | ntrdeldacladkgirrghlpkqmigilsqehknmeekvrkklqemiadtdhrldmldrq |
| | tdrkirigrknaglpksgviadwlvrdmmrfqpvakdtsgkpinnskansteyrmlqral |
| | alfggekerltpyfrqmnliggnnphpfldetrweshtnilsfyrsylrarkaflerigr |
| | sdrvenrpflllkepktdrqtivagwksefhlprgifteavrdcliemgydevgsykevg |
| | fmakavplyferackdrvqpfydspfnvgnslkpkkgrflskekraeewesgkerfrlak |
| | lkkeileaqehpyhdfkswqkferelrlyknqdiitwmmcrdlmeenkvegldtgtlylk |
| | dirpnvqeqgslnvlnrvkpmrlpvvvyradsrghvhkeeaplatvyieerdtkllkqgn |
| | fksfvkdrrlnglfsfvdtgglameqypisklrveyelakyqtarvcvfeltlrleesll |
| | styphlpdesfremleswsdpllakwpelhgkvrlliavrnafshnqypmydeavfssir |
| | kydpsspdaieermglniahrlseevkqaketveriiqa |
| Porphyromonas gulae | mteqserpyngtyytledkhfwaaflnlarhnayitlthidrqlayskaditndqdvlsf |
| (NZ_JRAK01000129.1) | kalwknfdndlerksrlrslilkhfsflegaaygkklfeskssgnkssknkeltkkekee |
| >WP_039426176.1 | lqanalsldnlksilfdflqklkdfrnyyshyrhsgsselplfdgnmlqrlynvfdvsvq |
| (SEQ ID NO: 154) | rvkrdhehndkvdphyhfnhlvrkgkkdryghndnpsfkhhfvdsegmvteagllffvsl |
| | flekrdaiwmqkkirgfkggtgpyeqmtnevfcrsrislpklkleslrtddwmlldmlne |
| | lvrcpkplydrlrekdracfrvpvdilpdeddtdgggedpfkntlvrhqdifpyfalryf |
| | dlkkvftslrfhidlgtyhfaiykkmigeqpedrhltrnlygfgriqdfaeehrpeewkr |
| | lvrdldyfetgdkpyisqttphyhiekgkiglrfmpegqhlwpspevgttrtgrskyaqd |
| | krltaeaflsvhelmpmmfyyfllrekyseevsaekvqgrikrvdkdvyaiydafardei |
| | ntlkeldacsadkgirrghlpkqmigilsqehknmeekvrkklqemiadtdhrldmldrq |
| | tdrkirigrknaglpksgviadwlvrdmmrfqpvakdtsgkpinnskansteyrmlqral |
| | alfggekerltpyfrqmnliggnnphpfldetrweshtnilsfyrsylrarkaflerigr |
| | sdrvenrpflllkepkndrqtivagwksefhlprgifteavrdcliemgydevgsykevg |
| | fmakavplyferackdrvqpfydspfnvgnslkpkkgrflskekraeewesgkerfrlak |
| | lkkeileakehpyhdfkswqkferelrlyknqdiitwmmcrdlmeenkvegldtgtlylk |
| | dirtdvheqgslnvlnrvkpmrlpvvvyradsrghvhkeqaplatvyieerdtkllkqgn |
| | fksfvkdrrlnglfsfvdtgglameqypisklrveyelakyqtarvcafeqtleleesll |
| | tryphlpdenfremleswsdpllgkwpdlhgkvrlliavrnafshnqypmydeavfssir |
| | kydpsspdaieermglniahrlseevkqaketveriiqa |
| Porphyromonas gulae | mteqserpyngtyytledkhfwaaflnlarhnayitlthidrqlayskaditndedilff |
| (NZ_KN294104.1) | kgqwknldndlerksrlrslilkhfsflegaaygkkffeskssgnkssknkeltkkekee |
| >WP_039437199.1 | lqanalsldnlksilfdflqklkdfrnyyshyrhsgsselplfdgnmlqrlynvfdvsyq |
| (SEQ ID NO: 155) | rvkrdhehndevdphyhfnhlvrkgkkthyghndnpsfkhhfvdgegmvteagllffvsl |
| | flekrdaiwmqkkirgfkggtepyeqmtnevfcrsrislpklkleslrtddwmlldmlne |
| | lvrcpkplydrlrekdracfrvpvdilpdeddtdgggedpfkntlvrhqdifpyfalryf |
| | dlkkvftslrfhidlgtyhfaiykkmigeqpedrhltrnlygfgriqdfaeehrpeewkr |
| | lvrdldyfetgdkpyisqttphyhiekgkiglrfvpegqhlwpspevgttrtgrskyaqd |
| | krltaeaflsvhelmpmmfyyfllrekyseevsaekvqgrikrviedvyaiydafardei |
| | ntlkeldacladkgirrghlpkqmigilsqerkdmeekvrkklqemiadtdhrldmldrq |
| | tdrkirigrknaglpksgviadwlvrdmmrfqpvakdtsgkpinnskansteyrmlqral |
| | alfggekerltpyfrqmnliggnnphpflhetrweshtnilsfyrsylrarkaflerigr |
| | sdrvencpflllkepktdrqtivagwkgefhlprgifteavrdcliemgydevgsyrevg |
| | fmakavplyferacedrvqpfydspfnvgnslkpkkgrflskekraeewesgkerfrlak |
| | lkkeileaqehpyhdfkswqkferelrlyknqdiitwmmcrdlmeenkvegldtgtlylk |
| | dirpnvqeqgslnvlntvlpmrlpvvvyradsrghvhkeeaplatvyieerdtkllkqgn |
| | fksfvkdrrlnglfsfvdtgalameqypisklrveyelakyqtarvcafeqtleleesll |
| | tryphlpdesfremleswsdplltkwpelhgkvrlliavrnafshnqypmydeavfssiw |
| | kydpsspdaieermglniahrlseevkqaketieriiqa |
| Porphyromonas | mteqnekpyngtyytledkhfwaaffnlarhnayitlahidrqlayskaditndedilff |
| gingivalis TDC60 | kgqwknldndlerkarlrslilkhfsflegaaygkklfesqssgnkssknkeltkkekee |
| (NC_015571.1) | lqanalsldnlksilfdflqklkdfrnyyshyrhpesselplfdgnmlqrlynvfdvsyq |
| >WP_013816155.1 | wkrdhehndlcvdphrhfnhlvrkgkkdrygnndnpffkhhfvdregtvteagllffvsl |
| (SEQ ID NO: 156) | flekrdaiwmqkkirgfkggtetyqqmtnevfcrsrislpklkleslrtddwmlldmlne |
| | lvrcpkslydrlreedrarfrvpvdilsdeedtdgaeedpfkntlvrhqdrfpyfalryf |
| | dlkkvftslrfqidlgtyhfaiykknigeqpedrhltmlygfgriqclfaeehrpeewkr |
| | lvrdldyfetgdkpyitqttphyhiekgkiglrfvpegqhlwpspevgatrtgrskyaqd |
| | krftaeaflsahelmpmmfyyfllrekyseeasaervqgrikridedvyavydafardei |
| | ntrdeldacladkgirrghlprqmigilsqehkdmeekirkklqemmadtdhrldmldrq |
| | tdrkirigrknaglpksgviadwlvrdmmrfqpvakdtsgkpinnskansteyrmlqral |
| | alfggekerltpyfrqmnitggnnphpflhetrweshtnilsfyrsylkarkaflqsigr |
| | sdrvenhrflllkepktdrqtivagwkgefhlprgifteavrdcliemgldevgsykevg |
| | fmakavplyferackdwvqpfynypfnvgnslkpkkgrfiskekraeewesgkerfrlak |
| | lkkeileakehpyldfkswqkferelrlyknqdittwmicgdlmeenkvegldtgtlylk |
| | dirtdvqeqgslnvlnrvkpmrlpvvvyradsrghvhkeqaplatvyieerdtkllkqgn |
| | fksfvkdrrlnglfsfvdtgalameqypisklrveyelakyqtarvcafeqtleleesll |
| | trcphlpdknfrkmleswsdplldkwpdlhrkvrlliavrnafshnqypmydeavfssir |
| | kydpsfpdaieermglniahrlseevkqaketveriiqa |
| Porphyromonas | mteqnerpyngtyytledkhfwaaffnlarhnayitlahidrqlayskaditndedilff |
| gingivalis ATCC 33277 | kgqwknldndlerkarlrslilkhfsflegaaygkklfesqssgnksskkkeltkkekee |
| (NC_010729.1) | lqanalsldnlksilfdflqklkdfinyyshyrhpesselplfdgnmlqrlynvfdvsyq |
| >WP_012458414.1 | rvkrdhehndkvdphrhfnhlvrkgkkdrygnndnpffkhhfvdreekvteagllffvsl |
| (SEQ ID NO: 157) | flekrdaiwmqkkirgfkggtetyqqmtnevfcrsrislpklkleslrtddwmlldmlne |
| | lvrcpkslydrlreedrarfrvpvdilsdeddtdgteedpfkntlvrhqdrfpyfalryf |
| | dlkkvftslrfhidlgtyhfaiykknigeqpedrhltrnlygfgriqdfaeehipeewkr |
| | lvrdldyfetgdkpyitqttphyhiekgkiglrfvpegqhlwpspevgatrtgrskyaqd |
| | krltaeaflsvhelmpmmfyyfllrekysdeasaervqgrikrvdedvyavydafargei |
| | ntrdeldacladkgirrghlprqmigilsqehkdmeekvrkklqemivdtdhrldmldrq |
| | tdrkirigrknaglpksgviadwlvrdmmrfqpvakdtsgkpinnskansteyrmlqral |
| | alfggekerltpyfrqmnliggnnphpflhetrweshtnilsfyrsylkarkaflqsigr |
| | sdrvenhrflllkepktdrqtivagwkgefhlprgifteavrdcliemgldevgsykevg |
| | fmakavplyferackdrvqpfydypfnvgnslkpkkgiflskekraeewesgkelfrlak |
| | lkkeileakehpyldfkswqkferelrlyknqdittwmicrdlmeenkvegldtgtlylk |
| | dirtdvqeqgnlnvlnrvkpmrlpvvvyradsrghvhkeqaplatvyieerdtkllkqgn |
| | fksfvkdrrlnglfsfvdtgalameqypisklrveyelakyqtarvcafeqtleleesll |
| | tryphlpdknfrkmleswsdplldkwpdlhgnvrlliavrnafshnqypmydeavfssir |
| | kydpsspdaieermglniahrlseevkqakemaeriiqa |
| Porphyromonas | mteqnekpyngtyytlkdkhfwaaffnlarhnayitlthidrqlayskaditndedilff |
| gingivalis A7 A1-28 | kgqwknldndlerkarlrslilkhfsflegaaygkklfesqssgnksskkkeltkkekee |
| (NZ_CP013131.1) | lqanalsldnlksilfdflqklkdfinyyshyrhpesselpmfdgnmlqrlynvfdvsyq |
| >WP_058019250.1 | rvkrdhehndkvdphrhfnhlvrkgkkdrcgnndnpffkhhfvdregkvteagllffvsl |
| (SEQ ID NO: 158) | flekrdaiwmqkkirgfkggtetyqqmtnevfcrsrislpklkleslrtddwmlldmlne |
| | lvrcpkslydrlreedracfrvpvdilsdeddtdgaeedpfkntlvrhqdrfpyfalryf |
| | dlkkvftslrfhidlgtyhfaiykknigeqpedrhltrnlygfgriqdfaeehrpeewkr |
| | lvrdldcfetgdkpyitqttphyhiekgkiglrfvpegqhlwpspevgatrtgrskyaqd |
| | krftaeaflsvhelmpmmfyyfllrekyseevsaervqgrikrvdedvyavydafardei |
| | ntrdeldacladkgirrghlprqmiailsqkhkdmeekvrkklqemiadtdhrldmldrq |
| | tdrkirigrknaglpksgviadwlvrdmmrfqpvakdtsgkpinnskansteyrmlqral |
| | alfggekerltpyfrqmnliggnnphpflhetrweshtnilsfyrsylkarkaflqsigr |
| | sdrvenhrflllkepktdrqtivagwkgefhlprgifteavrdcliemgldevgsykevg |
| | fmakavplyferackdrvqpfydypfnvgnslkpkkgiflskekraeewesgkelfrdle |
| | awshsaarriedafagienasrenkkkieqllqdlslwetfesklkvkadkiniaklkke |
| | ileakehpyldfkswqkferelrlyknqdiftwmmcrdlmeenkvegldtgtlylkdirt |
| | dvqeqgslnylnhvkpmrlpvvvyradsrghvhkeqaplatvyieerdtkllkqgnfksf |
| | vkdrrlnglfsfvdtgalameqypisklrveyelakyqtarvcafeqtleleeslltryp |
| | hlpdenfrkmleswsdplldkwpdlhrkvriliavrnafshnqypmydeavfssirkydp |
| | sspdaieermglniahrlseevkqakemaeriiqa |
| Porphyromonas | mteqnekpyngtyytledlchfwaaffnlarhnayithhidrqlayskaditndedilff |
| gingivalis JCVI SC001 | kgqwknldndlerkarlrslilkhfsflegaaygkklfesqssgnksskkkeltkkekee |
| (APMB01000175.1) | lqanalsldnlksilfdflqklkdfinyyshyrhpesselplfdgnmlqrlynvfdvsyq |
| >EOA10535.1 | rvkrdhehndkvdphrhfnhlvrkgkkdrcgnndnpffkhhfvdreekvteagllffvsl |
| (SEQ ID NO: 159) | flekrdaiwmqkkirgfkggtetyqqmtnevfcrsrislpklkleslrtddwmlldmlne |
| | lvrcpkslydrlreedrarfrvpvdilsdeddtdgteedpfkntlvrhqdrfpyfalryf |
| | dlkkvftslrfhidlgtyhfaiykknigeqpedrhltrnlygfgriqdfaeehipeewkr |
| | lvrdldyfetgdkpyitqttphyhiekgkiglrfvpegqllwpspevgatrtgrskyaqd |
| | krftaeaflsvhelmpmmfyyfllrekyseeasaervqgrikrviedvyavydafargei |
| | dtldrldacladkgirrghlprqmiailsqehkdmeekvrkklqemiadtdhrldmldrq |
| | tdrkirigrknaglpksgviadwlvrdmmrfqpvakdtsgkpinnskansteyrmlqral |
| | alfggekerltpyfrqmnliggnnphpflhetrweshtnilsfyrsylkarkaflqsigr |
| | sdrvenhrfillkepktdrqtivagwkgefhlprgifteavrdcliemgldevgsykevg |
| | fmakavplyferackdrvqpfydypfnvgnslkpkkgrflskekraeewesgkerfrdle |
| | awshsaarriedafagienasrenkkkieqllqdlslwetfesklkvkadkiniaklkke |
| | ileakehpyldfkswqkferelrlyknqdittwmmcrdlmeenkvegldtgtlylkdirt |
| | dvheqgslnvlnrvkpmrlpvvvyradsrghvhkeqaplatvyieerdtkllkqgnfksf |
| | vkdrrlnglfsfvdtgalameqypisklrveyelakyqtarvcafeqtleleeslltryp |
| | hlpdknfrkmleswsdplldkwpdlhgnvrlliavrnafshnqypmydetlfssirkydp |
| | sspdaieermglniahrlseevkqakemveriiqa |
| Porphyromonas | mteqnekpyngtyytledkhfwaaffnlarhnayitlahidrqlayskaditndedilff |
| gingivalis W50 | kgqwknldndlerkarlrslilkhfsflegaaygkklfesqssgnksskkkeltkkekee |
| (NZ_AJZS01000051.1) | lqanalsldnlksilfdflqklkdfrnyyshyrhpesselplfdgnmlqrlynvfdvsvq |
| >WP_005874195.1 | nlrdhehndkvdphrhfnhlvrkgkkdkygnndnpfflchhfvdreekvteagllffvsl |
| (SEQ ID NO: 160) | flekrdaiwmqkkirgfkggteayqqmtnevfcrsrislpklkleslrtddwmlldmlne |
| | lvrcpkslydrlreedrarflipvdilsdeddtdgteedpfkntivrhqthfpyfaltyf |
| | dlklvftslrfhidlgtyhfaiykknigeqpedrhltrnlygfgriqdfaeehrpeewkr |
| | lvrdldyfetgdkpyitqttphyhiekgkiglrfvpegqllwpspevgatrtgrskyaqd |
| | krftaeaflsvhelmpmmfyyfllrekyseeasaekvqgrikrvdedvyavydafardei |
| | ntrdeldacladkgirrghlprqmiailsqehkdmeekvrkklqemiadtdhrldmldrq |
| | tdrkirigrknaglpksgviadwlvrdmmrfqpvakdtsgkpinnskansteyrmlqral |
| | alfggekerltpyfrqmnliggnnphpflhetrweshtnilsfyrsylkarkaflqsigr |
| | sdreenhrfillkepktdrqtivagwksefhlprgifteavrdcliemgydevgsykevg |
| | fmakavplyferackdrvqpfydypfnvgnslkpkkgrflskekraeewesgkerfrdle |
| | awshsaarriedafvgieyaswenkkkieqllqdlslwetfesklkvkadkiniaklkke |
| | ileakehpyhdfkswqkferelrlyknqdiitwmmcrdlmeenkvegldtgtlylkdirt |
| | dvqeqgslnvlnhvkpmrlpvvvyradsrghvhkeeaplatvyieerdtkllkqgnfksf |
| | vkdrringlfsfvdtgalameqypisklrveyelakyqtarvcafeqtleleeslltryp |
| | hlpdesfremleswsdpildkwpdlqrevrlliavmafshnqypmydetifssirkydp |
| | ssldaieermglniahrlseevklakemveriiqa |
| Porphyromonas | mteqnekpyngtyytledkhfwaaffnlarhnayitlahidrqlayskaditndedilff |
| gingivalis | kgqwknldndlerkarlrslilkhfsflegaaygkklfesqssgnksskkkeltkkekee |
| (NZ_CP011995.1) | lqanalsldnlksilfdflqklkdfrnyyshyrhpesselplfdgnmlqrlynvfdvsyq |
| >WP_052912312.1 | nlrdhehndkvdphrhfnhlvrkgkkdkygnndnpfflchhfvdreekvteagllffvsl |
| (SEQ ID NO: 161) | flekrdaiwmqkkirgfkggteayqqmtnevfcrsrislpklklestrtddwmlldmlne |
| | lvrcpktlydrlreedrarfrvpvdilsdeddtdgteedpfkntivrhqthfpyfallyf |
| | dlklvftslrfhidlgtyhfaiykknigeqpedrhltrnlygfgriqdfaeehrpeewkr |
| | lvrdldyfetgdkpyitqttphyhiekgkiglrfvpegqllwpspevgatrtgrskyaqd |
| | kiftaeaftsvhelmpmmfyyfllrekyseeasaekvqgrikrviedvyavydafardei |
| | ntrdeldacladkgirrghlprqmiailsqehkdmeekvrkklqemiadtdhrldmldrq |
| | tdrkirigrknaglpksgviadwlvrdmmrfqpvakdtsgkpinnskansteyrmlqral |
| | alfggekerltpyfrqmnliggnnphpflhetrweshtnilsfyrsylkarkaflqsigr |
| | sdreenhrfillkepktdrqtivagwksefhlprgifteavrdcliemgydevgsykevg |
| | fmakavplyferackdrvqpfydypfnvgnslkpkkgrflskekraeewesgkerfrdle |
| | awshsaarriedafvgieyaswenkkkieqllqdlslwetfesklkvkadkiniaklkke |
| | ileakehpyhdfkswqkferelrlyknqdiitwmmcrdlmeenkvegldtgtlylkdirt |
| | dvqeqgslnvlnhvkpmrlpvvvyradsrghvhkeeaplatvyieerdtkllkqgnfksf |
| | vkdrrlnglfsfvdtgalameqypisklrveyelakyqtarvcafeqtleleeslltryp |
| | hlpdesfremleswsdplldkwpdlqrevrlliavrnafshnqypmydetifssirkydp |
| | ssldaieermglniahrlseevklakemveriiqa |
| Porphyromonas | mteqnekpyngtyytledkhfwaaflnlarhnayitlahidrqlayskaditndedilff |
| gingivalis AJVV4 | kgqwknldndlerkarlrslilkhfsflegaaygkklfesqssgnksskkkelskkekee |
| (NZ_CP011996.1) | lqanalsldnlksilfdflqklkdfrnyyshyrhpesselplfdgnmlqrlynvfdvsyq |
| >WP_053444417.1 | nlrdhehndkvdphrhfnhlvrkgkkdkygnndnpfflchhfvdregtvteagllffvsl |
| (SEQ ID NO: 162) | flekrdaiwmqkkirgfkggteayqqmtnevfcrsrislpklklestrtddwmlldmlne |
| | lvrcpkslydrlreedrarflipvdilsdeddtdgteedpfkntivrhqthfpyfaltyf |
| | dlklvftslrfhidlgtyhfaiykknigeqpedrhltrnlygfgriqdfaeehrpeewkr |
| | lvrdldyfetgdkpyitqttphyhiekgkiglrfvpegqhlwpspevgatrtgrskyaqd |
| | krltaeaftsvhelmpmmfyyfllrekyseevsaekvqgrikrviedvyavydafardei |
| | ntrdeldacladkgirrghlprqmiailsqehkdmeekvrkklqemiadtdhrldmldrq |
| | tdrkirigrknaglpksgvvadwlvrdmmrfqpvakdtsgkpinnskansteyrmlqral |
| | alfggekerltpyfrqmnliggnnphpflhetrweshtnilsfyrsylearkaflqsigr |
| | sdrvenhrfillkepktdrqtivagwkgefhlprgifteavrdcliemgydevgsykevg |
| | fmakavplyferaskdrvqpfydypfnvgnslkpkkgrflskekraeewesgkerfrlak |
| | lkkeileakehpyhdtkswqkferelrlyknqdittwmmcrdlmeenkvegldtgtlylk |
| | dirtdvqeqgslnvlnrvkpmrlpvvvyradsrgtwhkeqaplatvyieerdtkllkqgn |
| | fksfvkdrrlnglfsfvdtgalameqypisklrveyelakyqtarvcafeqtleleesll |
| | tryphlpdknfrkmleswsdpildkwpdlhgnvrlliavrnafshnqypmydetlfssir |
| | kydpsspdaieermglniahrlseevkqakemveriiqa |
| Porphyromonas | mteqnerpyngtyytledkhfwaaffnlarhnayitlahidrqlayskaditndedilff |
| gingivalis | kgqwknldndlerkarlrslilkhfsflegaaygkklfesqssgnksskkkeltkkekee |
| (NZ_CP007756.1) | lqanalsldnlksilfdflqklkdfinyyshyrhpesselplfdgnmlqrlynvfdvsyq |
| >WP_039417390.1 | mkrdhehndlcvdphrhfnhlvrkgkkdrygnndnpftkhhfvdregtvteagllffvsl |
| (SEQ ID NO: 163) | flekrdaiwmqkkirgfkggteayqqmtnevfcrsrislpklklestrtddwmlldmlne |
| | lvrcpkslydrlreedrarfrvpidilsdeddtdgteedpfkatlvrhqdrfpyfalryf |
| | dlklvftslrfhidlgtyhfaiykknigeqpedrhltrnlygfgriqdfaeehipeewkr |
| | lvrdldyfetgdkpyitqttphyhiekgkiglrfvpegqhlwpspevgatrtgrskyaqd |
| | krltaeaftsvhelmpmmfyyfllrekyseevsaekvqgrikrviedvyavydafargei |
| | dtldrldacladkgirrghlprqmiailsqehkdmeekvrkklqemiadtdhrldmldrq |
| | tdrkirigrknaglpksgviadwlvrdmmrfqpvakdtsgkpinnskansteyrmlqral |
| | alfggekerltpyfrqmnliggnnphpflhetrweshtnilsfyrsylkarkaflqsigr |
| | sdreenhrfillkepktdrqtivagwksefhlprgifteavrdcliemgydevgsykevg |
| | fmakavplyferackdrvqpfydypfnvgnslkpkkgrflskekraeewesgkerfrlak |
| | lkkeileakehpyldfkswqkferelrlyknqdiftwmmcrdlmeenkvegldtgtlylk |
| | dirtdvheqgslnvlnrvkpmrlpvvvyradsrghvhkeqaplatvyieerdtkllkqgn |
| | fksfvkdrrlnglfsfvdtgalameqypisklrveyelakyqtarvcafeqtleleesll |
| | tryphlpdknfrkmleswsdpildkwpdthrkvrlliavrnafshnqypmydeavfssir |
| | kydpsspdaieermglniahrlseevkqakemaeriiqv |
| Porphyromonas | mteqnerpyngtyytledkhfwaaffnlarhnayitlthidrqlayskaditndedilff |
| gingivalis | kgqwknldndlerkarlrslilkhfsflegaaygkklfenkssgnksskkkeltkkekee |
| (NZ_LOEL01000001.1) | lqanalsldnlksilfdflqklkdfinyyshyrhpesselplfdgnmlqrlynvfdvsvq |
| >WP_061156470.1 | mkrdhehndlcvdphrhfnhlvrkgkkdrcgnndnpftkhhfvdregkvteagllffvsl |
| (SEQ ID NO: 164) | flekrdaiwmqkkirgfkggteayqqmtnevfcrsrislpklklestrtddwmlldmlne |
| | lvrcpkslydrlreedrarfrvmvdilsdeddtdgteedpfkativrhqdrfpyfalryf |
| | dlklvftslrfhidlgtyhfaiykknigeqpedrhltrnlygfgriqdfaeehipeewkr |
| | lvrdldyfetgdkpyitqttphyhiekgkiglrfvpegqhlwpspevgatrtgrskyaqd |
| | krltaeaftsvhelmpmmfyyfllrekyseevsaekvqgrikrviedvyavydafargei |
| | dtldrldacladkgirrghlprqmiailsqehkdmeekvrkklqemiadtdhrldmldrq |
| | tdrkirigrknaglpksgviadwlvrdmmrfqpvakdtsgkpinnskansteyrmlqral |
| | alfggekerltpyfrqmnliggnnphpflhetrweshtnilsfyrsylkarkaflqsigr |
| | sdreenhrfillkepktdrqtivagwksefhlprgifteavrdcliemgydevgsykevg |
| | fmakavplyferackdrvqpfydypfnvgnslkpkkgrflskekraeewesgkerfrlak |
| | lkkeileakehpyldfkswqkferelrlyknqdiftwmmcrdlmeenkvegldtgtlylk |
| | dirtevqeqgslnvlnrvkpmrlpvvvyradsrghvhkeqaplatvyieerdtkllkqgn |
| | fksfvkdrrlnglfsfvdtgglameqypisklrveyelakyqtarvcafeqtleleesll |
| | trcphlpdknfrkmleswsdpildkwpdlqrevwlliavrnafshnqypmydeavfssir |
| | kydpsspdaieermglniahrlseevkqakemaeriiqa |

TABLE 6
Cas13c
Cas13c orthologs

| | |
|---|---|
| Fusobacterium | MEKFRRQNRNSIIKIIISNYDTKGIKELKVRYRKQAQLDTFIIKTEIVNNDIFIKSIIEKAREKYRYSF |
| necrophorum subsp. | LEDGEEKYHFKNKSSVEIVKKDIFSQTPDNMIRNYKITLKISEKNPRVVEAEIEDLMNSTILKDGR |
| funduliforme ATCC | RSARREKSMTERKLIEEKVAKNYSLLANCPMEEVDSIKIYKIKRELTYRSNMLLYFASINSFLCEG |
| 51357 contig00003 | IKGKDNETEEIWHLKDNDVRKEKVRENFKNKLIQSTENYNSSLKNQIEEKEKLLRKEFKKGAFY |
| WP_005959231.1 | RTIIKKLQQERIKELSEKSLTEDCEKIIKLYSKLRHSLMHYDYQYFENLFENKKNDDLMKDLNLD |
| (SEQ ID NO: 165) | LEKSLPLIRKMKLNNKVNYLEDGDTLFVLQKTKKAKTLYQIYDALCEQKNGENKFINDFFVSDG |
| | EENTVEKQIINEKFQSEMEFLEKRISESEKKNEKLKKKLDSMKAHFRNINSEDTKEAYFWDIHSS |
| | RNYKTKYNERKNLVNEYTELLGSSKEKKLLREEITKINRQLLKLKQEMEEITKKNSLERLEYKM |
| | KIAFGELFCEEDGNISKEKDEFDASNQEKIIQYHKNGEKYLTSFLKEEEKEKENLEKMQKIIQKTE |
| | EEDWLLPETKNNLEKFYLLTYLLLPYELKGDFLGFVKKHYYDIKNVDFIDENQNNIQVSQTVEK |
| | QEDYFYHKIRLFEKNTKKYEIVKYSIVPNEKLKQYFEDLGIDIKYLTVEQKSEVSEEKNKKVSLK |
| | NNGMFNKTILLFVFKYYQIAFKLENDIELYSLEFLREKSGKPLEIFRKELESKMKDGYLNEGQLLY |
| | VVYEVLVKNKDLDKILSKKIDYRKDKSFSPEIAYLRNFLSHLNYSKFLDNFMKINTNKSDENKEV |
| | LIPSIKIQKMIQFIEKCNLQNQIDFDFNEVNDFYMRKEKMFFIQLKQIFPDINSTEKQKMNEKEEIL |
| | RNRYHLTDKKNEQIKDEHEAQSQLYEKILSLQKIYSSDKNNFYGRLKEEKLLFLEKQGKKKLSM |
| | EEIKDKIAGDISDLLGILKKEITRDIKDKLTEKFRYCEEKLLNLSFYNHQDKKKEESIRVFLIRDKN |
| | SDNEKFESILDDGSNKIFISKNGKEITIQCCDKVLETLIIEKNTLKISSNGKIISLIPHYSYSIDVKY |
| Fusobacterium | MEKERRQNRSSIIKIIISNYDTKGIKELKVRYRKQAQLDTFIIKTEIVNNDIFIKSIIEKAREKYRYSF |
| necrophorum DJ-2 | LEDGEEKYHFKNKSSVEIVKKDIFSQTPDNMIRNYKITLKISEKNPRVVEAEIEDLMNSTILKDGR |
| contig0065, whole | RSARREKSMTERKLIEEKVAENYSLLANCPMEEVDSIKIYMKRELTYRSNMLLYFASINSFLCEG |
| genome shotgun | IKGKDNETEEIWHLKDNDVRKEKVKENFKNKLIQSTENYNSSLKNQIEEKEKLLRKESKKGAFY |
| sequence | RTIIKKLQQERIKELSEKSLTEDCEKIIKLYSELRHPLMHYDYQYFENLFENKENSELTKNLNLDIF |
| WP_035906563.1 | KSLPLVRKMKLNNKVNYLEDNDTLEVLQKTKKAKTLYQIYDALCEQKNGENKFINDFFVSDGE |
| WP_062627846.1 | ENTVEKQIINEKFQSEIEFLEKRISESEKKNEKLKKKLDSMKAHFRNINSEDTKEAYFWDIFISSRN |
| (SEQ ID NO: 166) | YKTKYNERKNLVNEYTELLGSSKEKKLLREEITKINRQLLKLKQEMEEITKKNSLERLEYKMKM |
| | AFGELFCEEDGNISRFKDEFDASNQEKIIQYHKNGEKYLTYFLKEEEKEKENLKKLQETIQKTGEE |
| | NVVLLPQNKNNLEKFYLLTYLLLPYELKGDFLGFVKKHYYDIKNVDEMDENQSSKIIESKEDDFY |
| | HKIRLFEKNTKKYEIVKYSIVPDKKLKQYFKDLGMTKYLILDQKSEVSGEKNKKVSLKNNGMF |
| | NKTILLFVFKYYQIAFKLENDIELYSLEFLREKSGKPFEVELKELKDKMIGKQLNEGQLLYVVYE |
| | VLVKNKDLSEILSERIDYRKDMCFSAEIADLRNELSHLNYSKFLDNFMKINTNKSDENKEVLIPSI |
| | KIQKMIKFIEECNLQSQIDFDFNEVNDFYMRKEKMFFIQLKQIFPDINSTEKQKMNEKEEILRNRY |
| | HLTDKKNEQIKDEHEAQSQLYEKILSLQKIYSSDKNNFYGRLKEEKLLFLEKQEKKKLSMEEIKD |
| | KIAGDISDLLGILKKEITRDIKDKLTEKFRYCEEKLLNLSFYNHQDKKKEESIRVFIIRDKNSDNEK |
| | FESILDDGSNKIFISKNGKEITIQCCDKVLETLIIEKNTLKISSNGKIISLIPHYSYSIDVKY |
| Fusobacterium | MKVRYRKQAQLDTFIIKTEIVNNDIFIKSIIEKAREKYRYSFLEDGEEKYHEKNKSSVEIVKNDIFS |
| necrophorum | QTPDNIVIIRNYKITLKISEKNPRVVEAEIEDLMNSTILKDGRRSARREKSMTERKLIEEKVAENYSL |
| BFTR-1 contig0068 | LANCPIEEVDSIKIYKIKRFLTYRSNMLLYFASINSFLCEGIKGKDNETEEIVVHLKDNDVRKEKVK |
| WP_035935671.1 | ENFKNKLIQSTENYNSSLKNQIEEKEKLSSKEFKKGAFYRTIIKKLQQERIKELSEKSLTEDCEKII |
| (SEQ ID NO: 167) | KLYSELRHPLMHYDYQYFENLFENKENSELTKNLNLDIFKSLPLVRKMKLNNKVNYLEDNDTL |
| | FVLQKTKKAKTLYQIYDALCEQKNGENKFINDFFVSDGEENTVEKQIINEKFQSEMEFLEKRISES |
| | EKKNEKLKKKLDSMKAHERNINSEDTKEAYFWDIFISSRNYKTKYNERKNLVNEYTKLLGSSKE |
| | KKLLREEITKINRQLLKLKQEMEEITKKNSLERLEYKMKIAFGELFCEEDGNISKEKDEFDASNQE |
| | KIIQYHKNGEKYLTSFLKEEEKEKENLEKMQKIIQKTEEEDWLLPETKNNLEKFYLLTYLLLPYE |
| | LKGDFLGFVKKHYYDIKNVDEMDENQNNIQVSQTVEKQEDYFYHKIRLFEKNTKKYEIVKYSIV |
| | PNEKLKQYFEDLGIDIKYLTGSVESGEKWLGENLGIDIKYLTVEQKSEVSEEKNKKVSLKNNGM |
| | FNKTILLFVFKYYQIAFKLENDIELYSLFFLREKSEKPFEVFLEELKDKMIGKQLNEGQLLYVVYE |
| | VLVKNKDLDKILSKKIDYRKDKSFSPEIAYLRNFLSHLNYSKFLDNFMKINTNKSDENKEVLIPSI |
| | KIQKMIQFIEKCNLQNQIDEDFNEVNDFYMRKEKMFFIQLKQIFPDINSTEKQKKSEKEEILRKRY |
| | HLINKKNEQIKDEHEAQSQLYEKILSLQKIFSCDKNNFYRRLKEEKLLFLEKQGKKKISMKEIKD |
| | KIASDISDLLGILKKEITRDIKDKLTEKFRYCEEKLLNISFYNHQDKKKEEGIRVFLIRDKNSDNFK |
| | FESILDDGSNKIFISKNGKEITIQCCDKVLETLMIEKNTLKISSNGKIISLIPHYSYSIDVKY |
| Fusobacterium | MTEKKSIIFKNKSSVEIVKKDIFSQTPDNMIRNYKITLKISEKNPRVVEAEIEDLMNSTILKDGRRS |
| necrophorum subsp. | ARREKSMTERKLIEEKVAENYSLLANCPMEEVDSIKIYKIKRELTYRSNMLLYFASINSFLCEGIK |
| funduliforme | GIGDNETEEIVVHLKDNDVRKEKVKENEKNKLIQSTENYNSSLKNQIEEKEKLLRKESKKGAFYRT |
| 1_1_36S cont1.14 | IIKKLQQERIKELSEKSLTEDCEKIIKLYSELRHPLMHYDYQYFENLFENKENSELTKNLNLDIFKS |
| EHO19081.1 | LPLVRKMKLNNKVNYLEDNDTLFVLQKTKKAKTLYQIYDALCEQKNGENKFINDFFVSDGEEN |
| (SEQ ID NO: 168) | TVFKQIINEKFQSEMEFLEKRISESEKKNEKLKKKFDSMKAHFHNINSEDTKEAYFWDIHSSSNY |
| | KTKYNERKNLVNEYTELLGSSKEKKLLREEITQINRKLLKLKQEMEEITKKNSLERLEYKMKIAF |
| | GELFCEEDGNISKFKDEFDASNQEKIIQYHKNGEKYLTYFLKEEEKEKFNLEKMQKIIQKTEEED |
| | WLLPETKNNLEKFYLLTYLLLPYELKGDFLGFVKKHYYDIKNVDEMDENQNNIQVSQTVEKQE |
| | DYFYHKIRLFEKNTKKYEIVKYSIVPNEKLKQYFEDLGIDIKYLTGSVESGEKWLGENLGIDIKYL |
| | TVEQKSEVSEEKIKKFL |
| Fusobacterium | MGKPNRSSIIKIIISNYDNKGIKEVKVRYNKQAQLDTFLIKSELKDGKFILYSIVDKAREKYRYSFE |
| perfoetens ATCC | IDKTNINKNEILIIKKDIYSNKEDKVIRKYILSFEVSEKNDRTIVTKIKDCLETQKKEKFERENTRRL |
| 29250 | ISETERKLLSEETQKTYSKIACCSPEDIDSVKIYKIKRYLAYRSNMLLFFSLINDIFVKGVVKDNGE |
| T364DRAFT_ | EVGEIVVRIIDSKEIDEKKTYDLLVENFKKRMSQEFINYKQSIENKIEKNTNKIKEIEQKLKKEKYK |
| scaffold00009.9_C | KEINRLKKQLIELNRENDLLEKDKIELSDEEIREDIEKILKIYSDLRHKLMHYNYQYFENLFENKKI |
| WP_027128616.1 | SKEKNEDVNLTELLDLNLFRYLPLVRQLKLENKTNYLEKEDKITVLGVSDSAIKYYSYYNFLCE |
| (SEQ ID NO: 169) | QKNGENNFINSFFSNDGEENKSEKEKINLSLEKEIEIMEKETNEKIKEINKNELQLMKEQKELGTA |
| | YVLDIHSLNDYKISHNERNKNVKLQNDIVINGNRDKNALDKINKKLVELKIKMDKITKRNSILRL |
| | KYKLQVAYGELMEEYKGNIKKEKDEFDISKEKIKSYKSKGEKYLEVKSEKKYITKILNSIEDIHNI |
| | TWLKNQEENNLEKEYVLTYILLPFEFRGDFLGFVKKHYYDIKNVEFLDENNDRLTPEQLEKMKN |
| | DSFFNKIRLFEKNSKKYDILKESILTSERIGKYFSLLNTGAKYFEYGGEENRGIFNKNIIIPIFKYYQI |
| | VLKLYNDVELAMLLTLSESDEKDINKIKELVTLKEKVSPKKIDYEKKYKFSVLLDCFNRIINLGK |
| | KDFLASEEVKEVAKTFTNLAYLRNKICHLNYSKFIDDLLTIDTNKSTTDSEGKLLINDRIRKLIKFI |
| | RENNQKMNISIDYNYINDYYMKKEKFIFGQRKQAKTIIDSGKKANKRNKAEELLKMYRVKKENI |
| | NLIYELSKKLNELTKSELFLLDKKLLKDIDFTDVKIKNKSFFELKNDVKEVANIKQALQKHSSELI |
| | GIYKKEVIMAIKRSIVSKLIYDEEKVLSIIIYDKTNKKYEDFLLEIRRERDINKFQFLIDEKKEKLGY |
| | EKIIETKEKKKVVVKIQNNSELVSEPRIIKNKDKKKAKTPEEISKLGILDLTNHYCFNLKITL |
| Fusobacterium | MENKGNNKKIDFDENYNILVAQIKEYFTKEIENYNNRIDNIIDKKELLKYSEKKEESEKNKKLEE |
| ulcerans ATCC | LNKLKSQKLKILTDEEIKADVIKIIKIFSDLRHSLMHYEYKYFENLFENKKNEELAELLNLNLEKN |
| 49185 cont2.38 | LTLLRQMKIENKTNYLEGREEFNIIGKNIKAKEVLGHYNLLAEQKNGENNFINSFEVQDGTENLE |
| WP_106878539.1 | FKKLIDEHEVNAKKRLERNIKKSKKLEKELEKMEQHYQRLNCAYVWDIHTSTTYKKLYNKRKS |
| WP_040490876.1 | LIEEYNKQINEIKDKEVITAINVELLRIKKEMEEITKSNSLERLKYKMQIAYAFLEIEFGGNIAKEK |
| (SEQ ID NO: 170) | DEEDCSKMEEVQKYLKKGVKYLKYYKDKEAQKNYEFPFEEIFENKDTHNEEWLENTSENNLEK |
| | FYILTYLLLPMEFKGDFLGVVKKHYYDIKNVDFTDESEKELSQVQLDKMIGDSFEHKIRLFEKNT |
| | KRYEIIKYSILTSDEIKRYFRLLELDVPYFEYEKGTDEIGIFNKNIILTIFKYYQIIFRLYNDLEIHGLF |
| | NISSDLDKILRDLKSYGNKNINFREFLYVIKQNNNSSTEEEYRKIVVENLEAKYLRLHLLTPEKEEI |
| | KTKTKEELEKLNEISNLRNGICHLNYKEIIEEILKTEISEKNKEATLNEKIRKVINFIKENELDKVEL |
| | GENFINDFFMKKEQFMFGQIKQVKEGNSDSITTERERKEKNNKKLKETYELNCDNLSEFYETSN |
| | NLRERANSSSLLEDSAFLKKIGLYKVKNNKVNSKVKDEEKRIENIKRKLLKDSSDIMGMYKAEV |
| | VKKLKEKLILIFKHDEEKRIYVTVYDTSKAVPENISKEILVKRNNSKEEYFFEDNNKKYVTEYYT |
| | LEITETNELKVIPAKKLEGKEEKTEKNKENKLMLNNHYCFNVKIIY |
| Anaerosalibacter sp. | MKSGRREKAKSNKSSIVRVIISNEDDKQVKEIKVLYTKQGGIDVIKEKSTEKDEKGRMKENEDCA |
| ND1 genome | YNRLEEEEENSEGGKGKQSFEVTTNEDLTELHVTKRHKTTGEIIKDYTIQGKYTPIKQDRTKVTV |
| assembly | SITDNKDHFDSNDLGDKIRLSRSLTQYTNRILLDADVMKNYREIVCSDSEKVDETINIDSQEIYKI |
| Anaerosalibacter | NRELSYRSNMHYYQMINNFLLHYDGEEDKGGNDSINLINEIWKYENKKNDEKEKIIERSYKSIEK |
| massiliensis ND1 | SINQYILNHNTEVESGDKEKKIDISEERIKEDLKKTFILFSRLRHYMVHYNYKEYENLYSGKNFITY |
| WP_042678931.1 | NKDKSKSRRESELLDLNIFKELSKIKLVKNRAVSNYLDKKTTIFIVLNKNINAIKLLDIYRDICETK |
| (SEQ ID NO: 171) | NGFNNFINNMMTISGEEDKEYKEMVTKHFNENMNKLSIYLENFKKHSDFKTNNKKKETYNLLK |
| | QELDEQKKLRLWFNAPYVYDNSSKKYKELYVERKKYVDIHSKLIEAGINNDNKKKLNEINVKL |
| | CELNTEMKEMTKLNSKYRLQYKLQLAFGFILEEFNLDIDKEVSAFDKDNNLTISKFMEKRETYLS |
| | KSLDRRDNRFKKLIKDYKERDTEDIFCSDRENNLVKLYILMYILLPVEIRGDFLGFVKKNYYDLK |
| | HVDFIDKRNNDNKDTFEHDLRLFEKNVKRLEVTSYSLSDGFLGKKSREKEGKELEKFIYKNVSIA |
| | LPTNIDIKEENKSLVLPMMKNYQHFKLLNDIEISALFLIAKKEGNEGSITEKKVIDKVRKEDMNGN |
| | INFSQVMKMALNEKVNCQIRNSIAHINMKQLYIEPLNIYINNNQNKKTISEQMEEIIDICITKGLTG |
| | KELNKNIINDYYMKKEKLVFNLKLRKRNNLVSIDAQQKNMKEKSILNKYDLNYKDENLNIKEII |
| | LKVNDLNNKQKLLKETTEGESNYKNALSKDILLLNGIIRKNINFKIKEMILGIIQQNEYRYVNINIY |
| | DKIRKEDHNIDLKINNKYIEISCYENKSNESTDERINFKIKYMDLKVKNELLVPSCYEDIYIKKKID |
| | LEIRYIENCKVVYIDIYYKKYNINLEFDGKTLFVKFNKDVKKNNQKVNLESNYIQNIKFIVS |

### Fusion Proteins

[0172] In some embodiments, the Cas protein is part of a fusion protein comprising one or more heterologous protein domains (e.g., about or more than about 1, 2, 3, 4, 5, 6, 7, 8, 9, 10, or more domains in addition to the nucleic acid-targeting effector protein). In some embodiments, the CRISPR effector protein is part of a fusion protein comprising one or more heterologous protein domains (e.g. about or more than about 1, 2, 3, 4, 5, 6, 7, 8, 9, 10, or more domains in addition to the CRISPR enzyme). A CRISPR enzyme fusion protein may comprise any additional protein sequence, and optionally a linker sequence between any two domains. Examples of protein domains that may be fused to a CRISPR enzyme include, without limitation, epitope tags, reporter gene sequences, and protein domains having one or more of the following activities: methylase activity, demethylase activity, transcription activation activity, transcription repression activity, transcription release factor activity, histone modification activity, RNA cleavage activity and nucleic acid binding activity. Non-limiting examples of epitope tags include histidine (His) tags, V5 tags, FLAG tags, influenza hemagglutinin (HA) tags, Myc tags, VSV-G tags, and thioredoxin (Trx) tags. Examples of reporter genes include, but are not limited to, glutathione-S-transferase (GST), horseradish peroxidase (HRP), chloramphenicol acetyltransferase (CAT) beta-galactosidase, beta-glucuronidase, luciferase, green fluorescent protein (GFP), HcRed, DsRed, cyan fluorescent protein (CFP), yellow fluorescent protein (YFP), and autofluorescent proteins including blue fluorescent protein (BFP). A CRISPR enzyme may be fused to a gene sequence encoding a protein or a fragment of a protein that bind DNA molecules or bind other cellular molecules, including but not limited to maltose binding protein (MBP), S-tag, Lex A DNA binding domain (DBD) fusions, GAL4 DNA binding domain fusions, and herpes simplex virus (HSV) BP16 protein fusions. Additional domains that may form part of a fusion protein comprising a CRISPR enzyme are described in US20110059502, incorporated herein by reference. In some embodiments, a tagged CRISPR enzyme is used to identify the location of a target sequence.

[0173] In some embodiments, a CRISPR effector protein may form a component of an inducible system. The inducible nature of the system would allow for spatiotemporal control of gene editing or gene expression using a form of energy. The form of energy may include but is not limited to electromagnetic radiation, sound energy, chemical energy and thermal energy. Examples of inducible system include tetracycline inducible promoters (Tet-On or Tet-Off), small molecule two-hybrid transcription activations systems (FKBP, ABA, etc), or light inducible systems (Phytochrome, LOV domains, or cryptochrome). In one embodiment, the CRISPR enzyme may be a part of a Light Inducible Transcriptional Effector (LITE) to direct changes in transcriptional activity in a sequence-specific manner. The components of a light may include a CRISPR enzyme, a light-responsive cytochrome heterodimer (e.g. from Arabidopsis thaliana), and a transcriptional activation/repression domain. Further examples of inducible DNA binding proteins and methods for their use are provided in U.S. 61/736,465 and U.S. 61/721,283 and WO 2014/018423 and U.S. Pat. Nos. 8,889,418, 8,895,308, US20140186919, US20140242700, US20140273234, US20140335620, WO2014093635, which is hereby incorporated by reference in its entirety.

### Recombination Templates

[0174] In some embodiments, a recombination template is also provided. The recombination template may be a component of a system herein. A recombination template may be a component of another vector as described herein, contained in a separate vector, or provided as a separate polynucleotide. In some embodiments, a recombination template is designed to serve as a template in homologous recombination, such as within or near a target sequence nicked or cleaved by a nucleic acid-targeting effector protein as a part of a nucleic acid-targeting complex.

[0175] In an embodiment, the template nucleic acid alters the sequence of the target position. In an embodiment, the template nucleic acid results in the incorporation of a modified, or non-naturally occurring base into the target nucleic acid.

[0176] The template sequence may undergo a breakage mediated or catalyzed recombination with the target sequence. In an embodiment, the template nucleic acid may include sequence that corresponds to a site on the target sequence that is cleaved by an Cas mediated cleavage event. In an embodiment, the template nucleic acid may include sequence that corresponds to both, a first site on the target sequence that is cleaved in a first Cas mediated event, and a second site on the target sequence that is cleaved in a second Cas mediated event.

[0177] In certain embodiments, the template nucleic acid can include sequence which results in an alteration in the coding sequence of a translated sequence, e.g., one which results in the substitution of one amino acid for another in a protein product, e.g., transforming a mutant allele into a wild type allele, transforming a wild type allele into a mutant allele, and/or introducing a stop codon, insertion of an amino acid residue, deletion of an amino acid residue, or a nonsense mutation. In certain embodiments, the template nucleic acid can include sequence which results in an alteration in a non-coding sequence, e.g., an alteration in an exon or in a 5′ or 3′ non-translated or non-transcribed region. Such alterations include an alteration in a control element, e.g., a promoter, enhancer, and an alteration in a cis-acting or trans-acting control element.

[0178] A template nucleic acid having homology with a target position in a target gene may be used to alter the structure of a target sequence. The template sequence may be used to alter an unwanted structure, e.g., an unwanted or mutant nucleotide. The template nucleic acid may include sequence which, when integrated, results in: decreasing the activity of a positive control element; increasing the activity of a positive control element; decreasing the activity of a negative control element; increasing the activity of a negative control element; decreasing the expression of a gene; increasing the expression of a gene; increasing resistance to a disorder or disease; increasing resistance to viral entry; correcting a mutation or altering an unwanted amino acid residue conferring, increasing, abolishing or decreasing a biological property of a gene product, e.g., increasing the enzymatic activity of an enzyme, or increasing the ability of a gene product to interact with another molecule.

[0179] The template nucleic acid may include sequence which results in: a change in sequence of 1, 2, 3, 4, 5, 6, 7, 8, 9, 10, 11, 12 or more nucleotides of the target sequence.

[0180] A template polynucleotide may be of any suitable length, such as about or more than about 10, 15, 20, 25, 50, 75, 100, 150, 200, 500, 1000, or more nucleotides in length. In an embodiment, the template nucleic acid may be 20+/−10, 30+/−10, 40+/−10, 50+/−10, 60+/−10, 70+/−10, 80+/−10, 90+/−10, 100+/−10, 1 10+/−10, 120+/−10, 130+/−10, 140+/−10, 150+/−10, 160+/−10, 170+/−10, 1 80+/−10, 190+/−10, 200+/−10, 210+/−10, of 220+/−10 nucleotides in length. In an embodiment, the template nucleic acid may be 30+/−20, 40+/−20, 50+/−20, 60+/−20, 70+/−20, 80+/−20, 90+/−20, 100+/−20, 1 10+/−20, 120+/−20, 130+/−20, 140+/−20, I 50+/−20, 160+/−20, 170+/−20, 180+/−20, 190+/−20, 200+/−20, 210+/−20, of 220+/−20 nucleotides in length. In an embodiment, the template nucleic acid is 10 to 1,000, 20 to 900, 30 to 800, 40 to 700, 50 to 600, 50 to 500, 50 to 400, 50 to 300, 50 to 200, or 50 to 100 nucleotides in length.

[0181] In some embodiments, the template polynucleotide is complementary to a portion of a polynucleotide comprising the target sequence. When optimally aligned, a template polynucleotide might overlap with one or more nucleotides of a target sequences (e.g. about or more than about 1, 5, 10, 15, 20, 25, 30, 35, 40, 45, 50, 60, 70, 80, 90, 100 or more nucleotides). In some embodiments, when a template sequence and a polynucleotide comprising a target sequence are optimally aligned, the nearest nucleotide of the template polynucleotide is within about 1, 5, 10, 15, 20, 25, 50, 75, 100, 200, 300, 400, 500, 1000, 5000, 10000, or more nucleotides from the target sequence.

[0182] The exogenous polynucleotide template comprises a sequence to be integrated (e.g., a mutated gene). The sequence for integration may be a sequence endogenous or exogenous to the cell. Examples of a sequence to be integrated include polynucleotides encoding a protein or a non-coding RNA (e.g., a microRNA). Thus, the sequence for integration may be operably linked to an appropriate control sequence or sequences. Alternatively, the sequence to be integrated may provide a regulatory function.

[0183] An upstream or downstream sequence may comprise from about 20 bp to about 2500 bp, for example, about 50, 100, 200, 300, 400, 500, 600, 700, 800, 900, 1000, 1100, 1200, 1300, 1400, 1500, 1600, 1700, 1800, 1900, 2000, 2100, 2200, 2300, 2400, or 2500 bp. In some methods, the exemplary upstream or downstream sequence have about 200 bp to about 2000 bp, about 600 bp to about 1000 bp, or more particularly about 700 bp to about 1000.

[0184] An upstream or downstream sequence may comprise from about 20 bp to about 2500 bp, for example, about 50, 100, 200, 300, 400, 500, 600, 700, 800, 900, 1000, 1100, 1200, 1300, 1400, 1500, 1600, 1700, 1800, 1900, 2000, 2100, 2200, 2300, 2400, or 2500 bp. In some methods, the exemplary upstream or downstream sequence have about 200 bp to about 2000 bp, about 600 bp to about 1000 bp, or more particularly about 700 bp to about 1000 pb.

[0185] In certain embodiments, one or both homology arms may be shortened to avoid including certain sequence repeat elements. For example, a 5′ homology arm may be shortened to avoid a sequence repeat element. In other embodiments, a 3′ homology arm may be shortened to avoid a sequence repeat element. In some embodiments, both the 5′ and the 3′ homology arms may be shortened to avoid including certain sequence repeat elements.

[0186] In some methods, the exogenous polynucleotide template may further comprise a marker. Such a marker may make it easy to screen for targeted integrations. Examples of suitable markers include restriction sites, fluorescent proteins, or selectable markers. The exogenous polynucleotide template of the invention can be constructed using recombinant techniques (see, for example, Sambrook et al., 2001 and Ausubel et al., 1996).

[0187] In certain embodiments, a template nucleic acids for correcting a mutation may designed for use as a single-stranded oligonucleotide. When using a single-stranded oligonucleotide, 5′ and 3′ homology arms may range up to about 200 base pairs (bp) in length, e.g., at least 25, 50, 75, 100, 125, 150, 175, or 200 bp in length.

[0188] Suzuki et al. describe in vivo genome editing via CRISPR/Cas9 mediated homology-independent targeted integration (2016, Nature 540:144-149).

### Systems

[0189] The invention also provides an engineered, non-naturally occurring Clustered Regularly Interspersed Short Palindromic Repeats (CRISPR)-CRISPR associated (Cas effector module) (CRISPR-Cas effector module) system. In some embodiments, the system may be a vector system comprising one or more vectors comprising: a) a first regulatory element operably linked to a nucleotide sequence encoding a non-naturally-occurring CRISPR enzyme of any one of the inventive constructs herein; and b) a second regulatory element operably linked to one or more nucleotide sequences encoding one or more of the guide RNAs, the guide RNA comprising a guide sequence, a direct repeat sequence, wherein: components (a) and (b) are located on same or different vectors, the CRISPR complex is formed; the guide RNA targets the target polynucleotide loci and the enzyme alters the polynucleotide loci, and the enzyme in the CRISPR complex has reduced capability of modifying one or more off-target loci as compared to an unmodified enzyme and/or whereby the enzyme in the CRISPR complex has increased capability of modifying the one or more target loci as compared to an unmodified enzyme.

[0190] As used herein, a CRISPR Cas effector module or CRISPR effector module includes, but is not limited to, Cas9, Cpf1, Cas12b, Cas12c, Cas13a, Cas13b, Cas13c, and Cas13d. In some embodiments, the CRISPR-Cas effector module may be engineered.

[0191] In such a system, component (II) may comprise a first regulatory element operably linked to a polynucleotide sequence which comprises the guide sequence, the direct repeat sequence, and wherein component (II) may comprise a second regulatory element operably linked to a polynucleotide sequence encoding the CRISPR enzyme. In such a system, where applicable the guide RNA may comprise a chimeric RNA.

[0192] In such a system, component (I) may comprise a first regulatory element operably linked to the guide sequence and the direct repeat sequence, and wherein component (II) may comprise a second regulatory element operably linked to a polynucleotide sequence encoding the CRISPR enzyme. Such a system may comprise more than one guide RNA, and each guide RNA has a different target whereby there is multiplexing. Components (a) and (b) may be on the same vector.

[0193] In any such systems comprising vectors, the one or more vectors may comprise one or more viral vectors, such as one or more retrovirus, lentivirus, adenovirus, adeno-associated virus or herpes simplex virus.

[0194] In any such systems comprising regulatory elements, at least one of said regulatory elements may comprise a tissue-specific promoter. The tissue-specific promoter may direct expression in a mammalian blood cell, in a mammalian liver cell or in a mammalian eye.

[0195] In any of the above-described compositions or systems the direct repeat sequence, may comprise one or more protein-interacting RNA aptamers. The one or more aptamers may be located in the tetraloop. The one or more aptamers may be capable of binding MS2 bacteriophage coat protein.

[0196] In any of the above-described compositions or systems the cell may be a eukaryotic cell or a prokaryotic cell; wherein the CRISPR complex is operable in the cell, and whereby the enzyme of the CRISPR complex has reduced capability of modifying one or more off-target loci of the cell as compared to an unmodified enzyme and/or whereby the enzyme in the CRISPR complex has increased capability of modifying the one or more target loci as compared to an unmodified enzyme.

[0197] The invention also provides a CRISPR complex of any of the above-described compositions or from any of the above-described systems.

[0198] The invention also provides a method of modifying a locus of interest in a cell comprising contacting the cell with any of the herein-described engineered CRISPR enzymes (e.g. engineered Cas effector module), compositions or any of the herein-described systems or vector systems, or wherein the cell comprises any of the herein-described CRISPR complexes present within the cell. In such methods the cell may be a prokaryotic or eukaryotic cell, preferably a eukaryotic cell. In such methods, an organism may comprise the cell. In such methods the organism may not be a human or other animal.

[0199] In certain embodiment, the invention also provides a non-naturally-occurring, engineered composition (e.g., engineered Cas9, Cpf1, Cas12b, Cas12c, Cas13a, Cas13b, Cas13c, and Cas13d, or any Cas protein which can fit into an AAV vector). Reference is made to FIGS. 19A, 19B, 19C, 19D, and 20A-F in U.S. Pat. No. 8,697,359 herein incorporated by reference to provide a list and guidance for other proteins which may also be used.

[0200] Any such method may be ex vivo or in vitro.

[0201] In certain embodiments, a nucleotide sequence encoding at least one of said guide RNA or Cas effector module is operably connected in the cell with a regulatory element comprising a promoter of a gene of interest, whereby expression of at least one CRISPR-Cas effector module system component is driven by the promoter of the gene of interest. “operably connected” is intended to mean that the nucleotide sequence encoding the guide RNA and/or the Cas effector module is linked to the regulatory element(s) in a manner that allows for expression of the nucleotide sequence, as also referred to herein elsewhere. The term “regulatory element” is also described herein elsewhere. According to the invention, the regulatory element comprises a promoter of a gene of interest, such as preferably a promoter of an endogenous gene of interest. In certain embodiments, the promoter is at its endogenous genomic location. In such embodiments, the nucleic acid encoding the CRISPR and/or Cas effector module is under transcriptional control of the promoter of the gene of interest at its native genomic location. In certain other embodiments, the promoter is provided on a (separate) nucleic acid molecule, such as a vector or plasmid, or other extrachromosomal nucleic acid, i.e. the promoter is not provided at its native genomic location. In certain embodiments, the promoter is genomically integrated at a non-native genomic location.

[0202] The invention also provides a method of altering the expression of a genomic locus of interest in a mammalian cell comprising contacting the cell with the engineered CRISPR enzymes (e.g. engineered Cas effector module), compositions, systems or CRISPR complexes described herein and thereby delivering the CRISPR-Cas effector module (vector) and allowing the CRISPR-Cas effector module complex to form and bind to target, and determining if the expression of the genomic locus has been altered, such as increased or decreased expression, or modification of a gene product.

[0203] The invention further provides for a method of making mutations to a Cas effector module or a mutated or modified Cas effector module that is an ortholog of the CRISPR enzymes according to the invention as described herein, comprising ascertaining amino acid(s) in that ortholog may be in close proximity or may touch a nucleic acid molecule, e.g., DNA, RNA, gRNA, etc., and/or amino acid(s) analogous or corresponding to herein-identified amino acid(s) in CRISPR enzymes according to the invention as described herein for modification and/or mutation, and synthesizing or preparing or expressing the orthologue comprising, consisting of or consisting essentially of modification(s) and/or mutation(s) or mutating as herein-discussed, e.g., modifying, e.g., changing or mutating, a neutral amino acid to a charged, e.g., positively charged, amino acid, e.g., Alanine. The so modified ortholog can be used in CRISPR-Cas effector module systems; and nucleic acid molecule(s) expressing it may be used in vector systems that deliver molecules or encoding CRISPR-Cas effector module system components as herein-discussed.

[0204] In one aspect, the invention provides a kit comprising one or more of the components described herein. In some embodiments, the kit comprises a vector system and instructions for using the kit. In some embodiments, the vector system comprises (a) a first regulatory element operably linked to a direct repeat sequence and one or more insertion sites for inserting one or more guide sequences downstream of the DR sequence, wherein when expressed, the guide sequence directs sequence-specific binding of a CRISPR-Cas effector module complex to a target sequence in a eukaryotic cell, wherein the CRISPR-Cas effector module complex comprises a Cas effector module complexed with (1) the guide sequence that is hybridized to the target sequence, and (2) the DR sequence; and/or (b) a second regulatory element operably linked to an enzyme-coding sequence encoding said Cas effector module comprising a nuclear localization sequence and advantageously this includes a split Cas effector module. In some embodiments, the kit comprises components (a) and (b) located on the same or different vectors of the system. In some embodiments, component (a) further comprises two or more guide sequences operably linked to the first regulatory element, wherein when expressed, each of the two or more guide sequences direct sequence specific binding of a CRISPR-Cas effector module complex to a different target sequence in a eukaryotic cell.

[0205] In one aspect, the invention provides a method of modifying a target polynucleotide in a eukaryotic cell. In some embodiments, the method comprises allowing a CRISPR-Cas effector module complex to bind to the target polynucleotide to effect cleavage of said target polynucleotide thereby modifying the target polynucleotide, wherein the CRISPR-Cas effector module complex comprises a Cas effector module complexed with a guide sequence hybridized to a target sequence within said target polynucleotide, wherein said guide sequence is linked to a direct repeat sequence. In some embodiments, said cleavage comprises cleaving one or two strands at the location of the target sequence by said Cas effector module; this includes a split Cas effector module. In some embodiments, said cleavage results in decreased transcription of a target gene. In some embodiments, the method further comprises repairing said cleaved target polynucleotide by homologous recombination with an exogenous template polynucleotide, wherein said repair results in a mutation comprising an insertion, deletion, or substitution of one or more nucleotides of said target polynucleotide. In some embodiments, said mutation results in one or more amino acid changes in a protein expressed from a gene comprising the target sequence. In some embodiments, the method further comprises delivering one or more vectors to said eukaryotic cell, wherein the one or more vectors drive expression of one or more of: the Cas effector module, and the guide sequence linked to the DR sequence. In some embodiments, said vectors are delivered to the eukaryotic cell in a subject. In some embodiments, said modifying takes place in said eukaryotic cell in a cell culture. In some embodiments, the method further comprises isolating said eukaryotic cell from a subject prior to said modifying. In some embodiments, the method further comprises returning said eukaryotic cell and/or cells derived therefrom to said subject.

[0206] In one aspect, the invention provides a method of modifying expression of a polynucleotide in a eukaryotic cell. In some embodiments, the method comprises allowing a CRISPR-Cas effector module complex to bind to the polynucleotide such that said binding results in increased or decreased expression of said polynucleotide; wherein the CRISPR-Cas effector module complex comprises a Cas effector module complexed with a guide sequence hybridized to a target sequence within said polynucleotide, wherein said guide sequence is linked to a direct repeat sequence; which may include a split Cas effector module. In some embodiments, the method further comprises delivering one or more vectors to said eukaryotic cells, wherein the one or more vectors drive expression of one or more of: the Cas effector module, and the guide sequence linked to the DR sequence.

[0207] In one aspect, the invention provides a method of generating a model eukaryotic cell comprising a mutated disease gene. In some embodiments, a disease gene is any gene associated an increase in the risk of having or developing a disease. In some embodiments, the method comprises (a) introducing one or more vectors into a eukaryotic cell, wherein the one or more vectors drive expression of one or more of: Cas effector module, and a guide sequence linked to a direct repeat sequence; and (b) allowing a CRISPR-Cas effector module complex to bind to a target polynucleotide to effect cleavage of the target polynucleotide within said disease gene, wherein the CRISPR-Cas effector module complex comprises a Cas effector module complexed with (1) the guide sequence that is hybridized to the target sequence within the target polynucleotide, and (2) the DR sequence, thereby generating a model eukaryotic cell comprising a mutated disease gene; this includes a split Cas effector module. In some embodiments, said cleavage comprises cleaving one or two strands at the location of the target sequence by said Cas effector module. In a preferred embodiment, the strand break is a staggered cut with a 5′ overhang. In some embodiments, said cleavage results in decreased transcription of a target gene. In some embodiments, the method further comprises repairing said cleaved target polynucleotide by homologous recombination with an exogenous template polynucleotide, wherein said repair results in a mutation comprising an insertion, deletion, or substitution of one or more nucleotides of said target polynucleotide. In some embodiments, said mutation results in one or more amino acid changes in a protein expression from a gene comprising the target sequence.

[0208] In one aspect the invention provides for a method of selecting one or more cell(s) by introducing one or more mutations in a gene in the one or more cell (s), the method comprising: introducing one or more vectors into the cell (s), wherein the one or more vectors drive expression of one or more of: a Cas effector module, a guide sequence linked to a direct repeat sequence, and an editing template; wherein the editing template comprises the one or more mutations that abolish Cas effector module cleavage; allowing homologous recombination of the editing template with the target polynucleotide in the cell(s) to be selected; allowing a CRISPR-Cas effector module complex to bind to a target polynucleotide to effect cleavage of the target polynucleotide within said gene, wherein the CRISPR-Cas effector module complex comprises the Cas effector module complexed with (1) the guide sequence that is hybridized to the target sequence within the target polynucleotide, and (2) the direct repeat sequence, wherein binding of the Cas effector module CRISPR-Cas effector module complex to the target polynucleotide induces cell death, thereby allowing one or more cell(s) in which one or more mutations have been introduced to be selected; this includes a split Cas effector module. In another preferred embodiment of the invention the cell to be selected may be a eukaryotic cell. Aspects of the invention allow for selection of specific cells without requiring a selection marker or a two-step process that may include a counter-selection system.

[0209] Compositions comprising a Cas effector module, complex or system comprising multiple guide RNAs, preferably tandemly arranged, or the polynucleotide or vector encoding or comprising said Cas effector module, complex or system comprising multiple guide RNAs, preferably tandemly arranged, for use in the methods of treatment as defined herein elsewhere are also provided. A kit of parts may be provided including such compositions. Use of said composition in the manufacture of a medicament for such methods of treatment are also provided. Use of a Cas effector module CRISPR system in screening is also provided by the present invention, e.g., gain of function screens. Cells which are artificially forced to overexpress a gene are be able to down regulate the gene over time (re-establishing equilibrium) e.g. by negative feedback loops. By the time the screen starts the unregulated gene might be reduced again. Using an inducible Cas effector module activator allows one to induce transcription right before the screen and therefore minimizes the chance of false negative hits. Accordingly, by use of the instant invention in screening, e.g., gain of function screens, the chance of false negative results may be minimized.

[0210] In another aspect, the invention provides an engineered, non-naturally occurring vector system comprising one or more vectors comprising a first regulatory element operably linked to the multiple Cas effector module CRISPR system guide RNAs that each specifically target a DNA molecule encoding a gene product and a second regulatory element operably linked coding for a CRISPR protein. Both regulatory elements may be located on the same vector or on different vectors of the system. The multiple guide RNAs target the multiple DNA molecules encoding the multiple gene products in a cell and the CRISPR protein may cleave the multiple DNA molecules encoding the gene products (it may cleave one or both strands or have substantially no nuclease activity), whereby expression of the multiple gene products is altered; and, wherein the CRISPR protein and the multiple guide RNAs do not naturally occur together. In a preferred embodiment the CRISPR protein is a Cas effector module, optionally codon optimized for expression in a eukaryotic cell. In a preferred embodiment the eukaryotic cell is a mammalian cell, a plant cell or a yeast cell and in a more preferred embodiment the mammalian cell is a human cell. In a further embodiment of the invention, the expression of each of the multiple gene products is altered, preferably decreased.

[0211] In one aspect, the invention provides a vector system comprising one or more vectors. In some embodiments, the system comprises: (a) a first regulatory element operably linked to a direct repeat sequence and one or more insertion sites for inserting one or more guide sequences up- or downstream (whichever applicable) of the direct repeat sequence, wherein when expressed, the one or more guide sequence(s) direct(s) sequence-specific binding of the CRISPR complex to the one or more target sequence(s) in a eukaryotic cell, wherein the CRISPR complex comprises a Cas effector module complexed with the one or more guide sequence(s) that is hybridized to the one or more target sequence(s); and (b) a second regulatory element operably linked to an enzyme-coding sequence encoding said Cas effector module, preferably comprising at least one nuclear localization sequence and/or at least one NES; wherein components (a) and (b) are located on the same or different vectors of the system. In some embodiments, component (a) further comprises two or more guide sequences operably linked to the first regulatory element, wherein when expressed, each of the two or more guide sequences direct sequence specific binding of a CRISPR complex to a different target sequence in a eukaryotic cell. In some embodiments, the CRISPR complex comprises one or more nuclear localization sequences and/or one or more NES of sufficient strength to drive accumulation of said CRISPR complex in a detectable amount in or out of the nucleus of a eukaryotic cell. In some embodiments, the first regulatory element is a polymerase III promoter. In some embodiments, the second regulatory element is a polymerase II promoter. In some embodiments, each of the guide sequences is at least 16, 17, 18, 19, 20, 25 nucleotides, or between 16-30, or between 16-25, or between 16-20 nucleotides in length.

[0212] Recombinant expression vectors can comprise the polynucleotides encoding the Cas effector module, system or complex for use in multiple targeting as defined herein in a form suitable for expression of the nucleic acid in a host cell, which means that the recombinant expression vectors include one or more regulatory elements, which may be selected on the basis of the host cells to be used for expression, that is operatively-linked to the nucleic acid sequence to be expressed. Within a recombinant expression vector, “operably linked” is intended to mean that the nucleotide sequence of interest is linked to the regulatory element(s) in a manner that allows for expression of the nucleotide sequence (e.g., in an in vitro transcription/translation system or in a host cell when the vector is introduced into the host cell).

[0213] In some embodiments, a host cell is transiently or non-transiently transfected with one or more vectors comprising the polynucleotides encoding the Cas effector module, system or complex for use in multiple targeting as defined herein. In some embodiments, a cell is transfected as it naturally occurs in a subject. In some embodiments, a cell that is transfected is taken from a subject. In some embodiments, the cell is derived from cells taken from a subject, such as a cell line. A wide variety of cell lines for tissue culture are known in the art and exemplified herein elsewhere. Cell lines are available from a variety of sources known to those with skill in the art (see, e.g., the American Type Culture Collection (ATCC) (Manassas, Va.)). In some embodiments, a cell transfected with one or more vectors comprising the polynucleotides encoding the Cas effector module, system or complex for use in multiple targeting as defined herein is used to establish a new cell line comprising one or more vector-derived sequences. In some embodiments, a cell transiently transfected with the components of a Cas effector module. system or complex for use in multiple targeting as described herein (such as by transient transfection of one or more vectors, or transfection with RNA), and modified through the activity of a Cas effector module, system or complex, is used to establish a new cell line comprising cells containing the modification but lacking any other exogenous sequence. In some embodiments, cells transiently or non-transiently transfected with one or more vectors comprising the polynucleotides encoding Cas effector module, system or complex for use in multiple targeting as defined herein, or cell lines derived from such cells are used in assessing one or more test compounds.

[0214] Advantageous vectors include lentiviruses and adeno-associated viruses, and types of such vectors can also be selected for targeting particular types of cells.

[0215] In one aspect, the invention provides a eukaryotic host cell comprising (a) a first regulatory element operably linked to a direct repeat sequence and one or more insertion sites for inserting one or more guide RNA sequences up- or downstream (whichever applicable) of the direct repeat sequence, wherein when expressed, the guide sequence(s) direct(s) sequence-specific binding of the CRISPR complex to the respective target sequence(s) in a eukaryotic cell, wherein the CRISPR complex comprises a Cas effector module complexed with the one or more guide sequence(s) that is hybridized to the respective target sequence(s); and/or (b) a second regulatory element operably linked to an enzyme-coding sequence encoding said Cas effector module comprising preferably at least one nuclear localization sequence and/or NES. In some embodiments, the host cell comprises components (a) and (b). In some embodiments, component (a), component (b), or components (a) and (b) are stably integrated into a genome of the host eukaryotic cell. In some embodiments, component (a) further comprises two or more guide sequences operably linked to the first regulatory element, and optionally separated by a direct repeat, wherein when expressed, each of the two or more guide sequences direct sequence specific binding of a CRISPR complex to a different target sequence in a eukaryotic cell. In some embodiments, the Cas effector module comprises one or more nuclear localization sequences and/or nuclear export sequences or NES of sufficient strength to drive accumulation of said CRISPR enzyme in a detectable amount in and/or out of the nucleus of a eukaryotic cell.

[0216] In certain aspects the invention involves vectors. Recombinant expression vectors can comprise a nucleic acid of the invention in a form suitable for expression of the nucleic acid in a host cell, which means that the recombinant expression vectors include one or more regulatory elements, which may be selected on the basis of the host cells to be used for expression, that is operatively-linked to the nucleic acid sequence to be expressed. Within a recombinant expression vector, “operably linked” is intended to mean that the nucleotide sequence of interest is linked to the regulatory element(s) in a manner that allows for expression of the nucleotide sequence (e.g. in an in vitro transcription/translation system or in a host cell when the vector is introduced into the host cell). With regards to recombination and cloning methods, mention is made of U.S. patent application Ser. No. 10/815,730, published Sep. 2, 2004 as US 2004-0171156 A1, the contents of which are herein incorporated by reference in their entirety.

[0217] The vector(s) can include the regulatory element(s), e.g., promoter(s). The vector(s) can comprise Cas encoding sequences, and/or a single, but possibly also can comprise at least 3 or 8 or 16 or 32 or 48 or 50 guide RNA(s) (e.g., sgRNAs) encoding sequences, such as 1-2, 1-3, 1-4 1-5, 3-6, 3-7, 3-8, 3-9, 3-10, 3-8, 3-16, 3-30, 3-32, 3-48, 3-50 RNA(s) (e.g., sgRNAs). In a single vector there can be a promoter for each RNA (e.g., sgRNA), advantageously when there are up to about 16 RNA(s) (e.g., sgRNAs); and, when a single vector provides for more than 16 RNA(s) (e.g., sgRNAs), one or more promoter(s) can drive expression of more than one of the RNA(s) (e.g., sgRNAs), e.g., when there are 32 RNA(s) (e.g., sgRNAs), each promoter can drive expression of two RNA(s) (e.g., sgRNAs), and when there are 48 RNA(s) (e.g., sgRNAs), each promoter can drive expression of three RNA(s) (e.g., sgRNAs). By simple arithmetic and well established cloning protocols and the teachings in this disclosure one skilled in the art can readily practice the invention as to the RNA(s) (e.g., sgRNA(s) for a suitable exemplary vector such as AAV, and a suitable promoter such as the U6 promoter, e.g., U6-sgRNAs. For example, the packaging limit of AAV is ˜4.7 kb. The length of a single U6-sgRNA (plus restriction sites for cloning) is 361 bp. Therefore, the skilled person can readily fit about 12-16, e.g., 13 U6-sgRNA cassettes in a single vector. This can be assembled by any suitable means, such as a golden gate strategy used for TALE assembly (www.genome-engineering.org/taleffectors/). The skilled person can also use a tandem guide strategy to increase the number of U6-sgRNAs by approximately 1.5 times, e.g., to increase from 12-16, e.g., 13 to approximately 18-24, e.g., about 19 U6-sgRNAs. Therefore, one skilled in the art can readily reach approximately 18-24, e.g., about 19 promoter-RNAs, e.g., U6-sgRNAs in a single vector, e.g., an AAV vector. A further means for increasing the number of promoters and RNAs, e.g., sgRNA(s) in a vector is to use a single promoter (e.g., U6) to express an array of RNAs, e.g., sgRNAs separated by cleavable sequences. And an even further means for increasing the number of promoter-RNAs, e.g., sgRNAs in a vector, is to express an array of promoter-RNAs, e.g., sgRNAs separated by cleavable sequences in the intron of a coding sequence or gene; and, in this instance it is advantageous to use a polymerase II promoter, which can have increased expression and enable the transcription of long RNA in a tissue specific manner. (see, e.g., nar.oxfordjournals.org/content/34/7/e53.short, www.nature.com/mt/journal/v16/n9/abs/mt2008144a.html). In an advantageous embodiment, AAV may package U6 tandem sgRNA targeting up to about 50 genes. Accordingly, from the knowledge in the art and the teachings in this disclosure the skilled person can readily make and use vector(s), e.g., a single vector, expressing multiple RNAs or guides or sgRNAs under the control or operatively or functionally linked to one or more promoters-especially as to the numbers of RNAs or guides or sgRNAs discussed herein, without any undue experimentation.

[0218] In some embodiments, a loop in the guide RNA is provided. This may be a stem loop or a tetra loop. The loop is preferably GAAA, but it is not limited to this sequence or indeed to being only 4 bp in length. Indeed, preferred loop forming sequences for use in hairpin structures are four nucleotides in length, and most preferably have the sequence GAAA. However, longer or shorter loop sequences may be used, as may alternative sequences. The sequences preferably include a nucleotide triplet (for example, AAA), and an additional nucleotide (for example C or G). Examples of loop forming sequences include CAAA and AAAG.

[0219] In certain embodiments, a nucleotide sequence encoding at least one of said guide RNA or Cas effector module is operably connected in the cell with a regulatory element comprising a promoter of a gene of interest, whereby expression of at least one CRISPR-Cas effector module system component is driven by the promoter of the gene of interest. “operably connected” is intended to mean that the nucleotide sequence encoding the guide RNA and/or the Cas effector module is linked to the regulatory element(s) in a manner that allows for expression of the nucleotide sequence, as also referred to herein elsewhere. The term “regulatory element” is also described herein elsewhere. According to the invention, the regulatory element comprises a promoter of a gene of interest, such as preferably a promoter of an endogenous gene of interest. In certain embodiments, the promoter is at its endogenous genomic location. In such embodiments, the nucleic acid encoding the CRISPR and/or Cas effector module is under transcriptional control of the promoter of the gene of interest at its native genomic location. In certain other embodiments, the promoter is provided on a (separate) nucleic acid molecule, such as a vector or plasmid, or other extrachromosomal nucleic acid, i.e. the promoter is not provided at its native genomic location. In certain embodiments, the promoter is genomically integrated at a non-native genomic location.

[0220] The invention also provides a method of altering the expression of a genomic locus of interest in a mammalian cell comprising contacting the cell with the engineered CRISPR enzymes (e.g. engineered Cas effector module), compositions, systems or CRISPR complexes described herein and thereby delivering the CRISPR-Cas effector module (vector) and allowing the CRISPR-Cas effector module complex to form and bind to target, and determining if the expression of the genomic locus has been altered, such as increased or decreased expression, or modification of a gene product.

[0221] The invention further provides for a method of making mutations to a Cas effector module or a mutated or modified Cas effector module that is an ortholog of the CRISPR enzymes according to the invention as described herein, comprising ascertaining amino acid(s) in that ortholog may be in close proximity or may touch a nucleic acid molecule, e.g., DNA, RNA, gRNA, etc., and/or amino acid(s) analogous or corresponding to herein-identified amino acid(s) in CRISPR enzymes according to the invention as described herein for modification and/or mutation, and synthesizing or preparing or expressing the orthologue comprising, consisting of or consisting essentially of modification(s) and/or mutation(s) or mutating as herein-discussed, e.g., modifying, e.g., changing or mutating, a neutral amino acid to a charged, e.g., positively charged, amino acid, e.g., Alanine. The so modified ortholog can be used in CRISPR-Cas effector module systems; and nucleic acid molecule(s) expressing it may be used in vector systems that deliver molecules or encoding CRISPR-Cas effector module system components as herein-discussed.

[0222] In one aspect, the invention provides a kit comprising one or more of the components described herein. In some embodiments, the kit comprises a vector system and instructions for using the kit. In some embodiments, the vector system comprises (a) a first regulatory element operably linked to a direct repeat sequence and one or more insertion sites for inserting one or more guide sequences downstream of the DR sequence, wherein when expressed, the guide sequence directs sequence-specific binding of a CRISPR-Cas effector module complex to a target sequence in a eukaryotic cell, wherein the CRISPR-Cas effector module complex comprises a Cas effector module complexed with (1) the guide sequence that is hybridized to the target sequence, and (2) the DR sequence; and/or (b) a second regulatory element operably linked to an enzyme-coding sequence encoding said Cas effector module comprising a nuclear localization sequence and advantageously this includes a split Cas effector module. In some embodiments, the kit comprises components (a) and (b) located on the same or different vectors of the system. In some embodiments, component (a) further comprises two or more guide sequences operably linked to the first regulatory element, wherein when expressed, each of the two or more guide sequences direct sequence specific binding of a CRISPR-Cas effector module complex to a different target sequence in a eukaryotic cell.

[0223] In one aspect, the invention provides a method of modifying a target polynucleotide in a eukaryotic cell. In some embodiments, the method comprises allowing a CRISPR-Cas effector module complex to bind to the target polynucleotide to effect cleavage of said target polynucleotide thereby modifying the target polynucleotide, wherein the CRISPR-Cas effector module complex comprises a Cas effector module complexed with a guide sequence hybridized to a target sequence within said target polynucleotide, wherein said guide sequence is linked to a direct repeat sequence. In some embodiments, said cleavage comprises cleaving one or two strands at the location of the target sequence by said Cas effector module; this includes a split Cas effector module. In some embodiments, said cleavage results in decreased transcription of a target gene. In some embodiments, the method further comprises repairing said cleaved target polynucleotide by homologous recombination with an exogenous template polynucleotide, wherein said repair results in a mutation comprising an insertion, deletion, or substitution of one or more nucleotides of said target polynucleotide. In some embodiments, said mutation results in one or more amino acid changes in a protein expressed from a gene comprising the target sequence. In some embodiments, the method further comprises delivering one or more vectors to said eukaryotic cell, wherein the one or more vectors drive expression of one or more of: the Cas effector module, and the guide sequence linked to the DR sequence. In some embodiments, said vectors are delivered to the eukaryotic cell in a subject. In some embodiments, said modifying takes place in said eukaryotic cell in a cell culture. In some embodiments, the method further comprises isolating said eukaryotic cell from a subject prior to said modifying. In some embodiments, the method further comprises returning said eukaryotic cell and/or cells derived therefrom to said subject.

[0224] In one aspect, the invention provides a method of modifying expression of a polynucleotide in a eukaryotic cell. In some embodiments, the method comprises allowing a CRISPR-Cas effector module complex to bind to the polynucleotide such that said binding results in increased or decreased expression of said polynucleotide; wherein the CRISPR-Cas effector module complex comprises a Cas effector module complexed with a guide sequence hybridized to a target sequence within said polynucleotide, wherein said guide sequence is linked to a direct repeat sequence; which may include a split Cas effector module. In some embodiments, the method further comprises delivering one or more vectors to said eukaryotic cells, wherein the one or more vectors drive expression of one or more of: the Cas effector module, and the guide sequence linked to the DR sequence.

[0225] In one aspect, the invention provides a method of generating a model eukaryotic cell comprising a mutated disease gene. In some embodiments, a disease gene is any gene associated an increase in the risk of having or developing a disease. In some embodiments, the method comprises (a) introducing one or more vectors into a eukaryotic cell, wherein the one or more vectors drive expression of one or more of: Cas effector module, and a guide sequence linked to a direct repeat sequence; and (b) allowing a CRISPR-Cas effector module complex to bind to a target polynucleotide to effect cleavage of the target polynucleotide within said disease gene, wherein the CRISPR-Cas effector module complex comprises a Cas effector module complexed with (1) the guide sequence that is hybridized to the target sequence within the target polynucleotide, and (2) the DR sequence, thereby generating a model eukaryotic cell comprising a mutated disease gene; this includes a split Cas effector module. In some embodiments, said cleavage comprises cleaving one or two strands at the location of the target sequence by said Cas effector module. In a preferred embodiment, the strand break is a staggered cut with a 5′ overhang. In some embodiments, said cleavage results in decreased transcription of a target gene. In some embodiments, the method further comprises repairing said cleaved target polynucleotide by homologous recombination with an exogenous template polynucleotide, wherein said repair results in a mutation comprising an insertion, deletion, or substitution of one or more nucleotides of said target polynucleotide. In some embodiments, said mutation results in one or more amino acid changes in a protein expression from a gene comprising the target sequence.

[0226] In one aspect the invention provides for a method of selecting one or more cell(s) by introducing one or more mutations in a gene in the one or more cell (s), the method comprising: introducing one or more vectors into the cell (s), wherein the one or more vectors drive expression of one or more of: a Cas effector module, a guide sequence linked to a direct repeat sequence, and an editing template; wherein the editing template comprises the one or more mutations that abolish Cas effector module cleavage; allowing homologous recombination of the editing template with the target polynucleotide in the cell(s) to be selected; allowing a CRISPR-Cas effector module complex to bind to a target polynucleotide to effect cleavage of the target polynucleotide within said gene, wherein the CRISPR-Cas effector module complex comprises the Cas effector module complexed with (1) the guide sequence that is hybridized to the target sequence within the target polynucleotide, and (2) the direct repeat sequence, wherein binding of the Cas effector module CRISPR-Cas effector module complex to the target polynucleotide induces cell death, thereby allowing one or more cell(s) in which one or more mutations have been introduced to be selected; this includes a split Cas effector module. In another preferred embodiment of the invention the cell to be selected may be a eukaryotic cell. Aspects of the invention allow for selection of specific cells without requiring a selection marker or a two-step process that may include a counter-selection system.

[0227] Compositions comprising a Cas effector module, complex or system comprising multiple guide RNAs, preferably tandemly arranged, or the polynucleotide or vector encoding or comprising said Cas effector module, complex or system comprising multiple guide RNAs, preferably tandemly arranged, for use in the methods of treatment as defined herein elsewhere are also provided. A kit of parts may be provided including such compositions. Use of said composition in the manufacture of a medicament for such methods of treatment are also provided. Use of a Cas effector module CRISPR system in screening is also provided by the present invention, e.g., gain of function screens. Cells which are artificially forced to overexpress a gene are be able to down regulate the gene over time (re-establishing equilibrium) e.g. by negative feedback loops. By the time the screen starts the unregulated gene might be reduced again. Using an inducible Cas effector module activator allows one to induce transcription right before the screen and therefore minimizes the chance of false negative hits. Accordingly, by use of the instant invention in screening, e.g., gain of function screens, the chance of false negative results may be minimized.

[0228] In another aspect, the invention provides an engineered, non-naturally occurring vector system comprising one or more vectors comprising a first regulatory element operably linked to the multiple Cas effector module CRISPR system guide RNAs that each specifically target a DNA molecule encoding a gene product and a second regulatory element operably linked coding for a CRISPR protein. Both regulatory elements may be located on the same vector or on different vectors of the system. The multiple guide RNAs target the multiple DNA molecules encoding the multiple gene products in a cell and the CRISPR protein may cleave the multiple DNA molecules encoding the gene products (it may cleave one or both strands or have substantially no nuclease activity), whereby expression of the multiple gene products is altered; and, wherein the CRISPR protein and the multiple guide RNAs do not naturally occur together. In a preferred embodiment the CRISPR protein is a Cas effector module, optionally codon optimized for expression in a eukaryotic cell. In a preferred embodiment the eukaryotic cell is a mammalian cell, a plant cell or a yeast cell and in a more preferred embodiment the mammalian cell is a human cell. In a further embodiment of the invention, the expression of each of the multiple gene products is altered, preferably decreased.

[0229] In one aspect, the invention provides a vector system comprising one or more vectors. In some embodiments, the system comprises: (a) a first regulatory element operably linked to a direct repeat sequence and one or more insertion sites for inserting one or more guide sequences up- or downstream (whichever applicable) of the direct repeat sequence, wherein when expressed, the one or more guide sequence(s) direct(s) sequence-specific binding of the CRISPR complex to the one or more target sequence(s) in a eukaryotic cell, wherein the CRISPR complex comprises a Cas effector module complexed with the one or more guide sequence(s) that is hybridized to the one or more target sequence(s); and (b) a second regulatory element operably linked to an enzyme-coding sequence encoding said Cas effector module, preferably comprising at least one nuclear localization sequence and/or at least one NES; wherein components (a) and (b) are located on the same or different vectors of the system. In some embodiments, component (a) further comprises two or more guide sequences operably linked to the first regulatory element, wherein when expressed, each of the two or more guide sequences direct sequence specific binding of a CRISPR complex to a different target sequence in a eukaryotic cell. In some embodiments, the CRISPR complex comprises one or more nuclear localization sequences and/or one or more NES of sufficient strength to drive accumulation of said CRISPR complex in a detectable amount in or out of the nucleus of a eukaryotic cell. In some embodiments, the first regulatory element is a polymerase III promoter. In some embodiments, the second regulatory element is a polymerase II promoter. In some embodiments, each of the guide sequences is at least 16, 17, 18, 19, 20, 25 nucleotides, or between 16-30, or between 16-25, or between 16-20 nucleotides in length.

[0230] Recombinant expression vectors can comprise the polynucleotides encoding the Cas effector module, system or complex for use in multiple targeting as defined herein in a form suitable for expression of the nucleic acid in a host cell, which means that the recombinant expression vectors include one or more regulatory elements, which may be selected on the basis of the host cells to be used for expression, that is operatively-linked to the nucleic acid sequence to be expressed. Within a recombinant expression vector, “operably linked” is intended to mean that the nucleotide sequence of interest is linked to the regulatory element(s) in a manner that allows for expression of the nucleotide sequence (e.g., in an in vitro transcription/translation system or in a host cell when the vector is introduced into the host cell).

[0231] In some embodiments, a host cell is transiently or non-transiently transfected with one or more vectors comprising the polynucleotides encoding the Cas effector module, system or complex for use in multiple targeting as defined herein. In some embodiments, a cell is transfected as it naturally occurs in a subject. In some embodiments, a cell that is transfected is taken from a subject. In some embodiments, the cell is derived from cells taken from a subject, such as a cell line. A wide variety of cell lines for tissue culture are known in the art and exemplified herein elsewhere. Cell lines are available from a variety of sources known to those with skill in the art (see, e.g., the American Type Culture Collection (ATCC) (Manassas, Va.)). In some embodiments, a cell transfected with one or more vectors comprising the polynucleotides encoding the Cas effector module, system or complex for use in multiple targeting as defined herein is used to establish a new cell line comprising one or more vector-derived sequences. In some embodiments, a cell transiently transfected with the components of a Cas effector module. system or complex for use in multiple targeting as described herein (such as by transient transfection of one or more vectors, or transfection with RNA), and modified through the activity of a Cas effector module, system or complex, is used to establish a new cell line comprising cells containing the modification but lacking any other exogenous sequence. In some embodiments, cells transiently or non-transiently transfected with one or more vectors comprising the polynucleotides encoding Cas effector module, system or complex for use in multiple targeting as defined herein, or cell lines derived from such cells are used in assessing one or more test compounds.

[0232] Advantageous vectors include lentiviruses and adeno-associated viruses, and types of such vectors can also be selected for targeting particular types of cells.

[0233] In one aspect, the invention provides a eukaryotic host cell comprising (a) a first regulatory element operably linked to a direct repeat sequence and one or more insertion sites for inserting one or more guide RNA sequences up- or downstream (whichever applicable) of the direct repeat sequence, wherein when expressed, the guide sequence(s) direct(s) sequence-specific binding of the CRISPR complex to the respective target sequence(s) in a eukaryotic cell, wherein the CRISPR complex comprises a Cas effector module complexed with the one or more guide sequence(s) that is hybridized to the respective target sequence(s); and/or (b) a second regulatory element operably linked to an enzyme-coding sequence encoding said Cas effector module comprising preferably at least one nuclear localization sequence and/or NES. In some embodiments, the host cell comprises components (a) and (b). In some embodiments, component (a), component (b), or components (a) and (b) are stably integrated into a genome of the host eukaryotic cell. In some embodiments, component (a) further comprises two or more guide sequences operably linked to the first regulatory element, and optionally separated by a direct repeat, wherein when expressed, each of the two or more guide sequences direct sequence specific binding of a CRISPR complex to a different target sequence in a eukaryotic cell. In some embodiments, the Cas effector module comprises one or more nuclear localization sequences and/or nuclear export sequences or NES of sufficient strength to drive accumulation of said CRISPR enzyme in a detectable amount in and/or out of the nucleus of a eukaryotic cell.

[0234] In certain aspects the invention involves vectors. A used herein, a “vector” is a tool that allows or facilitates the transfer of an entity from one environment to another. It is a replicon, such as a plasmid, phage, or cosmid, into which another DNA segment may be inserted so as to bring about the replication of the inserted segment. Generally, a vector is capable of replication when associated with the proper control elements. In general, the term “vector” refers to a nucleic acid molecule capable of transporting another nucleic acid to which it has been linked. Vectors include, but are not limited to, nucleic acid molecules that are single-stranded, double-stranded, or partially double-stranded; nucleic acid molecules that comprise one or more free ends, no free ends (e.g. circular); nucleic acid molecules that comprise DNA, RNA, or both; and other varieties of polynucleotides known in the art. One type of vector is a “plasmid,” which refers to a circular double stranded DNA loop into which additional DNA segments can be inserted, such as by standard molecular cloning techniques. Another type of vector is a viral vector, wherein virally-derived DNA or RNA sequences are present in the vector for packaging into a virus (e.g. retroviruses, replication defective retroviruses, adenoviruses, replication defective adenoviruses, and adeno-associated viruses (AAVs)). Viral vectors also include polynucleotides carried by a virus for transfection into a host cell. Certain vectors are capable of autonomous replication in a host cell into which they are introduced (e.g. bacterial vectors having a bacterial origin of replication and episomal mammalian vectors). Other vectors (e.g., non-episomal mammalian vectors) are integrated into the genome of a host cell upon introduction into the host cell, and thereby are replicated along with the host genome. Moreover, certain vectors are capable of directing the expression of genes to which they are operatively-linked. Such vectors are referred to herein as “expression vectors.” Common expression vectors of utility in recombinant DNA techniques are often in the form of plasmids.

[0235] Recombinant expression vectors can comprise a nucleic acid of the invention in a form suitable for expression of the nucleic acid in a host cell, which means that the recombinant expression vectors include one or more regulatory elements, which may be selected on the basis of the host cells to be used for expression, that is operatively-linked to the nucleic acid sequence to be expressed. Within a recombinant expression vector, “operably linked” is intended to mean that the nucleotide sequence of interest is linked to the regulatory element(s) in a manner that allows for expression of the nucleotide sequence (e.g. in an in vitro transcription/translation system or in a host cell when the vector is introduced into the host cell). With regards to recombination and cloning methods, mention is made of U.S. patent application Ser. No. 10/815,730, published Sep. 2, 2004 as US 2004-0171156 A1, the contents of which are herein incorporated by reference in their entirety.

[0236] The vector(s) can include the regulatory element(s), e.g., promoter(s). The vector(s) can comprise Cas encoding sequences, and/or a single, but possibly also can comprise at least 3 or 8 or 16 or 32 or 48 or 50 guide RNA(s) (e.g., sgRNAs) encoding sequences, such as 1-2, 1-3, 1-4 1-5, 3-6, 3-7, 3-8, 3-9, 3-10, 3-8, 3-16, 3-30, 3-32, 3-48, 3-50 RNA(s) (e.g., sgRNAs). In a single vector there can be a promoter for each RNA (e.g., sgRNA), advantageously when there are up to about 16 RNA(s) (e.g., sgRNAs); and, when a single vector provides for more than 16 RNA(s) (e.g., sgRNAs), one or more promoter(s) can drive expression of more than one of the RNA(s) (e.g., sgRNAs), e.g., when there are 32 RNA(s) (e.g., sgRNAs), each promoter can drive expression of two RNA(s) (e.g., sgRNAs), and when there are 48 RNA(s) (e.g., sgRNAs), each promoter can drive expression of three RNA(s) (e.g., sgRNAs). By simple arithmetic and well established cloning protocols and the teachings in this disclosure one skilled in the art can readily practice the invention as to the RNA(s) (e.g., sgRNA(s) for a suitable exemplary vector such as AAV, and a suitable promoter such as the U6 promoter, e.g., U6-sgRNAs. For example, the packaging limit of AAV is ˜4.7 kb. The length of a single U6-sgRNA (plus restriction sites for cloning) is 361 bp. Therefore, the skilled person can readily fit about 12-16, e.g., 13 U6-sgRNA cassettes in a single vector. This can be assembled by any suitable means, such as a golden gate strategy used for TALE assembly (www.genome-engineering.org/taleffectors/). The skilled person can also use a tandem guide strategy to increase the number of U6-sgRNAs by approximately 1.5 times, e.g., to increase from 12-16, e.g., 13 to approximately 18-24, e.g., about 19 U6-sgRNAs. Therefore, one skilled in the art can readily reach approximately 18-24, e.g., about 19 promoter-RNAs, e.g., U6-sgRNAs in a single vector, e.g., an AAV vector. A further means for increasing the number of promoters and RNAs, e.g., sgRNA(s) in a vector is to use a single promoter (e.g., U6) to express an array of RNAs, e.g., sgRNAs separated by cleavable sequences. And an even further means for increasing the number of promoter-RNAs, e.g., sgRNAs in a vector, is to express an array of promoter-RNAs, e.g., sgRNAs separated by cleavable sequences in the intron of a coding sequence or gene; and, in this instance it is advantageous to use a polymerase II promoter, which can have increased expression and enable the transcription of long RNA in a tissue specific manner. (see, e.g., nar.oxfordjournals.org/content/34/7/e53.short, www.nature.com/mt/journal/v16/n9/abs/mt2008144a.html). In an advantageous embodiment, AAV may package U6 tandem sgRNA targeting up to about 50 genes. Accordingly, from the knowledge in the art and the teachings in this disclosure the skilled person can readily make and use vector(s), e.g., a single vector, expressing multiple RNAs or guides or sgRNAs under the control or operatively or functionally linked to one or more promoters-especially as to the numbers of RNAs or guides or sgRNAs discussed herein, without any undue experimentation.

[0237] The guide RNA(s), e.g., sgRNA(s) encoding sequences and/or Cas encoding sequences, can be functionally or operatively linked to regulatory element(s) and hence the regulatory element(s) drive expression. The promoter(s) can be constitutive promoter(s) and/or conditional promoter(s) and/or inducible promoter(s) and/or tissue specific promoter(s). The promoter can be selected from the group consisting of RNA polymerases, pol I, pol II, pol III, T7, U6, H1, retroviral Rous sarcoma virus (RSV) LTR promoter, the cytomegalovirus (CMV) promoter, the SV40 promoter, the dihydrofolate reductase promoter, the β-actin promoter, the phosphoglycerol kinase (PGK) promoter, and the EFla promoter. An advantageous promoter is the promoter is U6.

[0238] Aspects of the invention relate to bicistronic vectors for guide RNA and (optionally modified or mutated) Cas effector modules. Bicistronic expression vectors for guide RNA and (optionally modified or mutated) CRISPR enzymes are preferred. In general and particularly in this embodiment (optionally modified or mutated) CRISPR enzymes are preferably driven by the CBh promoter. The RNA may preferably be driven by a Pol III promoter, such as a U6 promoter. The two can be combined.

[0239] The term “regulatory element” is intended to include promoters, enhancers, internal ribosomal entry sites (IRES), and other expression control elements (e.g. transcription termination signals, such as polyadenylation signals and poly-U sequences). Such regulatory elements are described, for example, in Goeddel, GENE EXPRESSION TECHNOLOGY: METHODS IN ENZYMOLOGY 185, Academic Press, San Diego, Calif. (1990). Regulatory elements include those that direct constitutive expression of a nucleotide sequence in many types of host cell and those that direct expression of the nucleotide sequence only in certain host cells (e.g., tissue-specific regulatory sequences). A tissue-specific promoter may direct expression primarily in a desired tissue of interest, such as muscle, neuron, bone, skin, blood, specific organs (e.g. liver, pancreas), or particular cell types (e.g. lymphocytes). Regulatory elements may also direct expression in a temporal-dependent manner, such as in a cell-cycle dependent or developmental stage-dependent manner, which may or may not also be tissue or cell-type specific. In some embodiments, a vector comprises one or more pol III promoter (e.g. 1, 2, 3, 4, 5, or more pol III promoters), one or more pol II promoters (e.g. 1, 2, 3, 4, 5, or more pol II promoters), one or more pol I promoters (e.g. 1, 2, 3, 4, 5, or more pol I promoters), or combinations thereof. Examples of pol III promoters include, but are not limited to, U6 and H1 promoters. Examples of pol II promoters include, but are not limited to, the retroviral Rous sarcoma virus (RSV) LTR promoter (optionally with the RSV enhancer), the cytomegalovirus (CMV) promoter (optionally with the CMV enhancer) [see, e.g., Boshart et al, Cell, 41:521-530 (1985)], the SV40 promoter, the dihydrofolate reductase promoter, the β-actin promoter, the phosphoglycerol kinase (PGK) promoter, and the EFla promoter. Also encompassed by the term “regulatory element” are enhancer elements, such as WPRE; CMV enhancers; the R-U5′ segment in LTR of HTLV-I (Mol. Cell. Biol., Vol. 8(1), p. 466-472, 1988); SV40 enhancer; and the intron sequence between exons 2 and 3 of rabbit β-globin (Proc. Natl. Acad. Sci. USA., Vol. 78(3), p. 1527-31, 1981). It will be appreciated by those skilled in the art that the design of the expression vector can depend on such factors as the choice of the host cell to be transformed, the level of expression desired, etc. A vector can be introduced into host cells to thereby produce transcripts, proteins, or peptides, including fusion proteins or peptides, encoded by nucleic acids as described herein (e.g., clustered regularly interspersed short palindromic repeats (CRISPR) transcripts, proteins, enzymes, mutant forms thereof, fusion proteins thereof, etc.). With regards to regulatory sequences, mention is made of U.S. patent application Ser. No. 10/491,026, the contents of which are incorporated by reference herein in their entirety. With regards to promoters, mention is made of PCT publication WO 2011/028929 and U.S. application Ser. No. 12/511,940, the contents of which are incorporated by reference herein in their entirety.

[0240] Vectors can be designed for expression of CRISPR transcripts (e.g. nucleic acid transcripts, proteins, or enzymes) in prokaryotic or eukaryotic cells. For example, CRISPR transcripts can be expressed in bacterial cells such as Escherichia coli, insect cells (using baculovirus expression vectors), yeast cells, or mammalian cells. Suitable host cells are discussed further in Goeddel, GENE EXPRESSION TECHNOLOGY: METHODS IN ENZYMOLOGY 185, Academic Press, San Diego, Calif. (1990). Alternatively, the recombinant expression vector can be transcribed and translated in vitro, for example using T7 promoter regulatory sequences and T7 polymerase.

[0241] Vectors may be introduced and propagated in a prokaryote or prokaryotic cell. In some embodiments, a prokaryote is used to amplify copies of a vector to be introduced into a eukaryotic cell or as an intermediate vector in the production of a vector to be introduced into a eukaryotic cell (e.g. amplifying a plasmid as part of a viral vector packaging system). In some embodiments, a prokaryote is used to amplify copies of a vector and express one or more nucleic acids, such as to provide a source of one or more proteins for delivery to a host cell or host organism. Expression of proteins in prokaryotes is most often carried out in Escherichia coli with vectors containing constitutive or inducible promoters directing the expression of either fusion or non-fusion proteins. Fusion vectors add a number of amino acids to a protein encoded therein, such as to the amino terminus of the recombinant protein. Such fusion vectors may serve one or more purposes, such as: (i) to increase expression of recombinant protein; (ii) to increase the solubility of the recombinant protein; and (iii) to aid in the purification of the recombinant protein by acting as a ligand in affinity purification. Often, in fusion expression vectors, a proteolytic cleavage site is introduced at the junction of the fusion moiety and the recombinant protein to enable separation of the recombinant protein from the fusion moiety subsequent to purification of the fusion protein. Such enzymes, and their cognate recognition sequences, include Factor Xa, thrombin and enterokinase. Example fusion expression vectors include pGEX (Pharmacia Biotech Inc; Smith and Johnson, 1988. Gene 67: 31-40), pMAL (New England Biolabs, Beverly, Mass.) and pRIT5 (Pharmacia, Piscataway, N.J.) that fuse glutathione S-transferase (GST), maltose E binding protein, or protein A, respectively, to the target recombinant protein. Examples of suitable inducible non-fusion E. coli expression vectors include pTrc (Amrann et al., (1988) Gene 69:301-315) and pET lid (Studier et al., GENE EXPRESSION TECHNOLOGY: METHODS IN ENZYMOLOGY 185, Academic Press, San Diego, Calif. (1990) 60-89). In some embodiments, a vector is a yeast expression vector. Examples of vectors for expression in yeast Saccharomyces cerevisiae include pYepSecl (Baldari, et al., 1987. EMBO J. 6: 229-234), pMFa (Kuijan and Herskowitz, 1982. Cell 30: 933-943), pJRY88 (Schultz et al., 1987. Gene 54: 113-123), pYES2 (Invitrogen Corporation, San Diego, Calif.), and picZ (InVitrogen Corp, San Diego, Calif.). In some embodiments, a vector drives protein expression in insect cells using baculovirus expression vectors. Baculovirus vectors available for expression of proteins in cultured insect cells (e.g., SF9 cells) include the pAc series (Smith, et al., 1983. Mol. Cell. Biol. 3: 2156-2165) and the pVL series (Lucklow and Summers, 1989. Virology 170: 31-39).

[0242] In some embodiments, a vector is capable of driving expression of one or more sequences in mammalian cells using a mammalian expression vector. Examples of mammalian expression vectors include pCDM8 (Seed, 1987. Nature 329: 840) and pMT2PC (Kaufman, et al., 1987. EMBO J. 6: 187-195). When used in mammalian cells, the expression vector's control functions are typically provided by one or more regulatory elements. For example, commonly used promoters are derived from polyoma, adenovirus 2, cytomegalovirus, simian virus 40, and others disclosed herein and known in the art. For other suitable expression systems for both prokaryotic and eukaryotic cells see, e.g., Chapters 16 and 17 of Sambrook, et al., MOLECULAR CLONING: A LABORATORY MANUAL. 2nd ed., Cold Spring Harbor Laboratory, Cold Spring Harbor Laboratory Press, Cold Spring Harbor, N.Y., 1989.

[0243] In some embodiments, the recombinant mammalian expression vector is capable of directing expression of the nucleic acid preferentially in a particular cell type (e.g., tissue-specific regulatory elements are used to express the nucleic acid). Tissue-specific regulatory elements are known in the art. Non-limiting examples of suitable tissue-specific promoters include the albumin promoter (liver-specific; Pinkert, et al., 1987. Genes Dev. 1: 268-277), lymphoid-specific promoters (Calame and Eaton, 1988. Adv. Immunol. 43: 235-275), in particular promoters of T cell receptors (Winoto and Baltimore, 1989. EMBO J. 8: 729-733) and immunoglobulins (Baneiji, et al., 1983. Cell 33: 729-740; Queen and Baltimore, 1983. Cell 33: 741-748), neuron-specific promoters (e.g., the neurofilament promoter; Byrne and Ruddle, 1989. Proc. Natl. Acad. Sci. USA 86: 5473-5477), pancreas-specific promoters (Edlund, et al., 1985. Science 230: 912-916), and mammary gland-specific promoters (e.g., milk whey promoter; U.S. Pat. No. 4,873,316 and European Application Publication No. 264,166). Developmentally-regulated promoters are also encompassed, e.g., the murine hox promoters (Kessel and Gruss, 1990. Science 249: 374-379) and the α-fetoprotein promoter (Campes and Tilghman, 1989. Genes Dev. 3: 537-546). With regards to these prokaryotic and eukaryotic vectors, mention is made of U.S. Pat. No. 6,750,059, the contents of which are incorporated by reference herein in their entirety. Other embodiments of the invention may relate to the use of viral vectors, with regards to which mention is made of U.S. patent application Ser. No. 13/092,085, the contents of which are incorporated by reference herein in their entirety. Tissue-specific regulatory elements are known in the art and in this regard, mention is made of U.S. Pat. No. 7,776,321, the contents of which are incorporated by reference herein in their entirety. In some embodiments, a regulatory element is operably linked to one or more elements of a CRISPR system so as to drive expression of the one or more elements of the CRISPR system.

[0244] Typically, in the context of an endogenous nucleic acid-targeting system, formation of a nucleic acid-targeting complex (comprising a guide RNA hybridized to a target sequence and complexed with one or more nucleic acid-targeting effector modules) results in cleavage of one or both RNA strands in or near (e.g. within 1, 2, 3, 4, 5, 6, 7, 8, 9, 10, 20, 50, or more base pairs from) the target sequence. In some embodiments, one or more vectors driving expression of one or more elements of a nucleic acid-targeting system are introduced into a host cell such that expression of the elements of the nucleic acid-targeting system direct formation of a nucleic acid-targeting complex at one or more target sites. For example, a nucleic acid-targeting effector module and a guide RNA could each be operably linked to separate regulatory elements on separate vectors. Alternatively, two or more of the elements expressed from the same or different regulatory elements, may be combined in a single vector, with one or more additional vectors providing any components of the nucleic acid-targeting system not included in the first vector. nucleic acid-targeting system elements that are combined in a single vector may be arranged in any suitable orientation, such as one element located 5′ with respect to (“upstream” of) or 3′ with respect to (“downstream” of) a second element. The coding sequence of one element may be located on the same or opposite strand of the coding sequence of a second element, and oriented in the same or opposite direction. In some embodiments, a single promoter drives expression of a transcript encoding a nucleic acid-targeting effector module and a guide RNA embedded within one or more intron sequences (e.g. each in a different intron, two or more in at least one intron, or all in a single intron). In some embodiments, the nucleic acid-targeting effector module and guide RNA are operably linked to and expressed from the same promoter.

### Features of Exemplary Cas Proteins

[0245] The CRISPR-Cas systems and Cas proteins may be engineered or modified according to their features, e.g., structural features of the Cas proteins.

### SaCas9

[0246] Structural characteristics of SaCas9 include those described in Nishimasu et al., Crystal Structure of Staphylococcus aureus Cas9, Cell 162, 1113-1126, Aug. 27, 2015.

[0247] Overall Structure:

[0248] SaCas9 adopts a bilobed architecture consisting of a recognition (REC) lobe (residues 41-425) and a nuclease (NUC) lobe (residues 1-40 and 435-1053). The two lobes are connected by an arginine-rich bridge helix (residues 41-73) and a linker loop (residues 426-434). The NUC lobe consists of the RuvC (residues 1-40, 435-480 and 650-774), HNH (residues 520-628), evolutionary divergent wedge (WED) (residues 788-909), and PAM-interacting (PI) (residues 910-1053) domains (FIGS. 1C and 1D). The PI domain can be divided into a Topoisomerase-homology (TOPO) domain and a C-terminal domain. The RuvC domain consists of three separate motifs (RuvC-I-III) and interacts with the HNH and PI domains. The HNH domain is connected to RuvCII and RuvC-III by the L1 (residues 481-519) and L2 (residues 629-649) linker regions, respectively. The WED and RuvC domains are connected by a “phosphate lock” loop (residues 775-787).

[0249] Guide:Target Recognition:

[0250] The guide:target heteroduplex is accommodated in the central channel formed between the REC and NUC lobes. The sugar-phosphate backbone of the PAM-distal region of the sgRNA interacts with the REC lobe (Thr238, Tyr239, Lys256, Arg314, Asn394, and Gln414). In SpCas9 and SaCas9, the RNA-DNA base pairing in the 8 bp PAM-proximal “seed” region in the guide:target heteroduplex is critical for Cas9-catalyzed DNA cleavage. Consistent with this, the phosphate backbone of the sgRNA seed region (C13-C20) is extensively recognized by the bridge helix (Asn44, Arg48, Arg51, Arg55, Arg59, and Arg60) and the REC lobe (Arg116, Gly117, Arg165, Gly166, Asn169, and Arg209). In addition, the 2′-OH groups of C15, U16, U17, and G19 of the sgRNA interact with the REC lobe (Gly166, Arg208, Arg209, and Tyr211). In addition, the sugar-phosphate backbone of the target DNA strand interacts with the REC lobe (Tyr211, Trp229, Tyr230, Gly235, Arg245, Gly391, Thr392, and Asn419) and the RuvC domain (Leu446, Tyr651 and Arg654). The C-terminal region of the REC lobe interacts with the PAM distal region of the heteroduplex, whereas the N-terminal region of the REC lobe interacts with the repeat:anti-repeat duplex and the PAM-proximal region of the heteroduplex.

[0251] sgRNA Scaffold Recognition:

[0252] The repeat:anti-repeat duplex is recognized by theRECandWED domains, primarily through interactions between the protein and the sugar-phosphate backbone. Consistent with data showing that the distorted repeat:anti-repeat duplex is critical for Cas9-catalyzed DNA cleavage, the internal loop is recognized by the WED domain. The 2′-OH of C30 hydrogen bonds with Tyr868, and the backbone phosphate groups of U31, C45, and U46 interact with Lys870, Arg792, and Lys881, respectively.

[0253] Stem loop 1 is recognized by the bridge helix and the REC lobe. The phosphate backbone of stem loop 1 interacts with the bridge helix (Arg47, Arg54, Arg55, Arg58, and Arg59) and the REC lobe (Arg209, Gly216, and Ser219). The 2′-OH of A63 hydrogen bonds with His62. The flipped-out U64 is recognized by Arg209 and Glu213 via stacking and hydrogen-bonding interactions, respectively. A55 is extensively recognized by the phosphate lock loop. The N6, N7, and 2′-OH of A55 hydrogen bond with Asn780/Arg781, Leu783, and Lys906, respectively. Lys57 interacts with the backbone phosphate group between C54 and A55, and the side chain of Leu783 forms hydrophobic contacts with the nucleobases of A55 and A56. The phosphate backbone of the linker region electrostatically interacts with the RuvC domain (Arg452, Lys459, and Arg774) and the phosphate lock loop (Arg781), and the nucleobase of G70 stacks with the side chain of Arg47 on the bridge helix.

[0254] PAM Recognition:

[0255] Consistent with the observed requirement for the 3rd G in the 5′-NNGRRT-3′ PAM, the 06 and N7 of dG3* form bidentate hydrogen bonds with the side chain of Arg1015, which is anchored via salt bridges with Glu993 in both complexes. In the 5′-TTGAAT-3′ PAM complex, the N7 atoms of dA4* and dA5* form direct and water-mediated hydrogen bonds with Asn985 and Asn985/Asn986/Arg991, respectively. In addition, the N6 of dA5* forms a water-mediated hydrogen bond with Asn985. Similarly, in the 5′-TTGGGT-3′ PAM complex, the N7 atoms of dG4* and dG5* form direct and water-mediated hydrogen bonds with Asn985 and Asn985/Asn986/Arg991, respectively. The 06 of dG5* forms a water-mediated hydrogen bond with Asn985. These structural features explain the ability of SaCas9 to recognize the purine nucleotides at positions 4 and 5 in the 5′-NNGRRT-3′ PAM. The 04 of dT6* hydrogen bonds with Arg991, explaining the preference of SaCas9 for the 6th T in the 5′-NNGRRT-3′ PAM. Single alanine mutations of these PAM-interacting residues reduced the cleavage activity in vivo, and double mutations abolished the activity (FIG. 5C), confirming the importance of Asn985, Asn986, Arg991, Glu993, and Arg1015 for PAM recognition. In addition, the phosphate backbone of the PAM duplex is recognized from the minor groove side by the WED domain (Tyr789, Tyr882, Lys886, Ans888, Ala889, and Leu909).

[0256] Target DNA Unwinding:

[0257] In SaCas9, the +1 phosphate between dA(_1) and dG1, in the target DNA strand, hydrogen bonds with the main-chain amide groups of Asp786 and Thr787 and the side chain of Thr787 in the phosphate lock loop. These interactions result in the rotation of the +1 phosphate, thereby facilitating base-pairing between dG1 in the target DNA strand and C20 in the sgRNA. The SaCas9 T787A mutant showed reduced DNA cleavage activity, confirming the functional significance of Thr787 in the phosphate lock loop.

[0258] RuvC Domain:

[0259] The RuvC domain of SaCas9 has an RNase H fold and cleaves the non-target DNA strand through a two-metal ion mechanism. Asp10, Glu477, His701, and Asp704 have been shown to be important for catalysis; the D10A, E477A, H701A, and D704A mutants of SaCas9 exhibited almost no DNA cleavage activity.

[0260] HNH Domain:

[0261] The HNH domain of SaCas9 has a bba-metal fold and cleaves the target DNA strand through a one-metal ion mechanism. Asp556, His557, and Asn580 have been shown to be important for catalysis; the H557A and N580A mutants of SaCas9 almost completely lacked DNA cleavage activity.

### SpCas9

[0262] Structural characteristics of SpCas9 include those described in Nishimasu et al., Crystal Structure of Cas9 in Complex with Guide RNA and Target DNA, Cell 156, 935-949, Feb. 27, 2014.

[0263] Overall Structure:

[0264] SpCas9 comprises two lobes: a recognition (REC) lobe and a nuclease (NUC) lobe. The REC lobe can be divided into three regions, a long a helix referred to as the bridge helix (residues 60-93), the REC1 (residues 94-179 and 308-713) domain, and the REC2 (residues 180-307) domain. The NUC lobe consists of the RuvC (residues 1-59, 718-769, and 909-1098), HNH (residues 775-908), and PAM-interacting (PI) (residues 1099-1368) domains. The negatively charged sgRNA:target DNA heteroduplex is accommodated in a positively charged groove at the interface between the REC and NUC lobes. In the NUC lobe, the RuvC domain is assembled from the three split RuvC motifs (RuvC I-III) and interfaces with the PI domain to form a positively charged surface that interacts with the 30 tail of the sgRNA. The HNH domain lies between the RuvC II-III motifs and forms only a few contacts with the rest of the protein.

[0265] REC Lobe:

[0266] The REC lobe includes the REC1 and REC2 domains. The REC2 domain does not contact the bound guide:target heteroduplex, indicating that truncation of REC lobe may be tolerated by SpCas9. Further, SpCas9 mutant lacking the REC2 domain (D175-307) retained ˜50% of the wild-type Cas9 activity, indicating that the REC2 domain is not critical for DNA cleavage. In striking contrast, the deletion of either the repeat-interacting region (D97-150) or the anti-repeat-interacting region (D312-409) of the REC1 domain abolished the DNA cleavage activity, indicating that the recognition of the repeat:anti-repeat duplex by the REC1 domain is critical for the Cas9 function.

[0267] PAM-Interacting Domain:

[0268] The NUC lobe contains the PAM-interacting (PI) domain that is positioned to recognize the PAM sequence on the noncomplementary DNA strand. The PI domain of SpCas9 is required for the recognition of 5′-NGG-3′ PAM, and deletion of the PI domain (A1099-1368) abolished the cleavage activity, indicating that the PI domain is critical for SpCas9 function and a major determinant for the PAM specificity.

[0269] Ruvc Domain:

[0270] The RuvC nucleases of SpCas9 have an RNase H fold and four catalytic residues, Asp10 (Ala), Glu762, His983, and Asp986, that are critical for the two-metal cleavage of the noncomplementary strand of the target DNA. In addition to the conserved RNase H fold, the Cas9 RuvC domain has other structural elements involved in interactions with the guide:target heteroduplex (an end-capping loop between α42 and α43) and the PI domain/stem loop 3 (β hairpin formed by 33 and 34).

[0271] Hnh Domain:

[0272] SpCas9 HNH nucleases have three catalytic residues, Asp839, His840, and Asn863 and cleave the complementary strand of the target DNA through a single-metal mechanism.

[0273] sgRNA:DNA Recognition:

[0274] The sgRNA guide region is primarily recognized by the REC lobe. The backbone phosphate groups of the guide region (nucleotides 2, 4-6, and 13-20) interact with the REC1 domain (Arg165, Gly166, Arg403, Asn407, Lys510, Tyr515, and Arg661) and the bridge helix (Arg63, Arg66, Arg70, Arg71, Arg74, and Arg78) (FIG. 6A). The 20-hydroxyl groups of G1, C15, U16, and G19 hydrogen bond with Val1009, Tyr450, Arg447/1Ile448, and Thr404, respectively.

[0275] A mutational analysis demonstrated that the R66A, R70A, and R74A mutations on the bridge helix markedly reduced the DNA cleavage activities, highlighting the functional significance of the recognition of the sgRNA “seed” region by the bridge helix. Although Arg78 and Arg165 also interact with the “seed” region, the R78A and R165A mutants showed only moderately decreased activities. These results are consistent with the fact that Arg66, Arg70, and Arg74 form multiple salt bridges with the sgRNA backbone, whereas Arg78 and Arg165 form a single salt bridge with the sgRNA backbone. Moreover, the alanine mutations of the repeat:anti-repeat duplex-interacting residues (Arg75 and Lys163) and the stemloop-1-interacting residue (Arg69) resulted in decreased DNA cleavage activity, confirming the functional importance of the recognition of the repeat:anti-repeat duplex and stem loop 1 by Cas9.

[0276] RNA-Guided DNA Targeting:

[0277] SpCas9 recognizes the guide:target heteroduplex in a sequence-independent manner. The backbone phosphate groups of the target DNA (nucleotides 1′, 9′-11′, 13′, and 20′) interact with the REC1 (Asn497, Trp659, Arg661, and Gln695), RuvC (G1n926), and PI (Glu1108) domains. The C2′ atoms of the target DNA (nucleotides 5′, 7′, 8′, 11′, 19′, and 20′) form van der Waals interactions with the REC1 domain (Leu169, Tyr450, Met495, Met694, and His698) and the RuvC domain (Ala728). The terminal base pair of the guide:target heteroduplex (G1:C20′) is recognized by the RuvC domain via end-capping interactions; the sgRNA G1 and target DNA C20′ nucleobases interact with the Tyr1013 and Val1015 side chains, respectively, whereas the 20-hydroxyl and phosphate groups of sgRNA G1 interact with Val11009 and Gln926, respectively.

[0278] Repeat:Anti-Repeat Duplex Recognition:

[0279] The nucleobases of U23/A49 and A42/G43 hydrogen bond with the side chain of Arg1122 and the main-chain carbonyl group of Phe351, respectively. The nucleobase of the flipped U44 is sandwiched between Tyr325 and His328, with its N3 atom hydrogen bonded with Tyr325, whereas the nucleobase of the unpaired G43 stacks with Tyr359 and hydrogen bonds with Asp364.

[0280] The nucleobases of G21 and U50 in the G21:U50 wobble pair stack with the terminal C20:G10 pair in the guide:target heteroduplex and Tyr72 on the bridge helix, respectively, with the U50 O4 atom hydrogen bonded with Arg75. Notably, A51 adopts the syn conformation and is oriented in the direction opposite to U50. The nucleobase of A51 is sandwiched between Phe1105 and U63, with its N1, N6, and N7 atoms hydrogen bonded with G62, Gly1103, and Phe1105, respectively.

[0281] Stem-Loop Recognition:

[0282] Stem loop 1 is primarily recognized by the REC lobe, together with the PI domain. The backbone phosphate groups of stem loop 1 (nucleotides 52, 53, and 59-61) interact with the REC1 domain (Leu455, Ser460, Arg467, Thr472, and Ile473), the PI domain (Lys1123 and Lys1124), and the bridge helix (Arg70 and Arg74), with the 20-hydroxyl group of G58 hydrogen bonded with Leu455. A52 interacts with Phe1105 through a face-to-edge p-p stacking interaction, and the flipped U59 nucleobase hydrogen bonds with Asn77.

[0283] The single-stranded linker and stem loops 2 and 3 are primarily recognized by the NUC lobe. The backbone phosphate groups of the linker (nucleotides 63-65 and 67) interact with the RuvC domain (Glu57, Lys742, and Lys1097), the PI domain (Thr1102), and the bridge helix (Arg69), with the 20-hydroxyl groups of U64 and A65 hydrogen bonded with Glu57 and His721, respectively. The C67 nucleobase forms two hydrogen bonds with Val1100.

[0284] Stem loop 2 is recognized by Cas9 via the interactions between the NUC lobe and the non-Watson-Crick A68:G81 pair, which is formed by direct (between the A68 N6 and G81 O6 atoms) and water-mediated (between the A68 N1 and G81 N1 atoms) hydrogen-bonding interactions (FIG. 6I). The A68 and G81 nucleobases contact Ser1351 and Tyr1356, respectively, whereas the A68:G81 pair interacts with Thr1358 via a watermediated hydrogen bond. The 20-hydroxyl group of A68 hydrogen bonds with His1349, whereas the G81 nucleobase hydrogen bonds with Lys33.

[0285] Stem loop 3 interacts with the NUC lobe more extensively, as compared to stem loop 2. The backbone phosphate group of G92 interacts with the RuvC domain (Arg40 and Lys44), whereas the G89 and U90 nucleobases hydrogen bond with Gln1272 and Glu1225/Ala1227, respectively. The A88 and C91 nucleobases are recognized by Asn46 via multiple hydrogen-bonding interactions.

### Cpf1

[0286] The present invention encompasses the use of a Cpf1 effector protein, derived from a Cpf1 locus denoted as subtype V-A. Herein such effector proteins are also referred to as “Cpf1p”, e.g., a Cpf1 protein (and such effector protein or Cpf1 protein or protein derived from a Cpf1 locus is also called “CRISPR enzyme”). Presently, the subtype V-A loci encompasses cas1, cas2, a distinct gene denoted cpf1 and a CRISPR array. Cpf1(CRISPR-associated protein Cpf1, subtype PREFRAN) is a large protein (about 1300 amino acids) that contains a RuvC-like nuclease domain homologous to the corresponding domain of Cas9 along with a counterpart to the characteristic arginine-rich cluster of Cas9. However, Cpf1 lacks the HNH nuclease domain that is present in all Cas9 proteins, and the RuvC-like domain is contiguous in the Cpf1 sequence, in contrast to Cas9 where it contains long inserts including the HNH domain. Accordingly, in particular embodiments, the CRISPR-Cas enzyme comprises only a RuvC-like nuclease domain.

### FnCf1

[0287] Structural characteristics of FnCpf1 include those described in (Swarts et al., Structural Basis for Guide RNA Processing and Seed-Dependent DNA Targeting by CRISPR-Cas12a, Molecular Cell 66, 221-233, Apr. 20, 2017.

[0288] Overall Structure:

[0289] FnCpf1 adopts a bilobed architecture with the two lobes connected by the wedge (WED) domain. The N-terminal REC lobe consists of two a-helical domains (REC1 and REC2) that have been shown to coordinate the crRNA-target DNA heteroduplex. The C-terminal NUC lobe consists of the C-terminal RuvC and Nuc domains involved in target cleavage, the arginine-rich bridge helix (BH), and the PAM-interacting (PI) domain. The repeat-derived segment of the crRNA forms a pseudoknot stabilized by intra-molecular base-pairing and hydrogen-bonding interactions. The pseudoknot is coordinated by residues from the WED, RuvC, and REC2 domains, as well as by two hydrated magnesium cations. Notably, nucleotides 1-5 of the crRNA are ordered in the central cavity of FnCas12a and adopt an A-form-like helical conformation. Conformational ordering of the seed sequence is facilitated by multiple interactions between the ribose and phosphate moieties of the crRNA backbone and FnCas12a residues in the WED and REC1 domains. These include residues Thr16, Lys595, His804, and His881 from the WED domain and residues Tyr47, Lys51, Phe182, and Arg186 from the REC1 domain. The structure of the FnCas12a-crRNA complex further reveals that the bases of the seed sequence are solvent exposed and poised for hybridization with target DNA.

[0290] Pre-crRNA Processing:

[0291] Essential restudies for crRNA processing include His843, Lys852, and Lys869. Structural observations are consistent with an acid-base catalytic mechanism in which Lys869 acts as the general base catalyst to deprotonate the attacking 2′-hydroxyl group of U(−19), while His843 acts as a general acid to protonate the 5′-oxygen leaving group of A(−18). In turn, the side chain of Lys852 is involved in charge stabilization of the transition state. Collectively, these interactions facilitate the intra-molecular attack of the 20-hydroxyl group of U(−19) on the scissile phosphate and promote the formation of the 2′,3′-cyclic phosphate product.

[0292] R-Loop Formation:

[0293] The crRNA-target DNA strand heteroduplex is enclosed in the central cavity formed by the REC and NUC lobes and interacts extensively with the REC1 and REC2 domains. The PAM-containing DNA duplex comprises target strand nucleotides dT0-dT8 and non-target strand nucleotides dA(8)*-dA0* and is contacted by the PI, WED, and REC1 domains. The 5′-TTN-3′ PAM is recognized in FnCas12a by a mechanism combining the shape-specific recognition of a narrowed minor groove, with base-specific recognition of the PAM bases by two invariant residues, Lys671 and Lys613. Directly downstream of the PAM, the duplex of the target DNA is disrupted by the side chain of residue Lys667, which is inserted between the DNA strands and forms a cation-nt stacking interaction with the dA0-dT0* base pair. The phosphate group linking target strand residues dT(−1) and dT0 is coordinated by hydrogen-bonding interactions with the side chain of Lys823 and the backbone amide of Gly826. Target strand residue dT(−1) bends away from residue T0, allowing the target strand to interact with the seed sequence of the crRNA. The non-target strand nucleotides dT1*-dT5* interact with the Arg692-Ser702 loop in FnCas12a through hydrogen-bonding and ionic interactions between backbone phosphate groups and side chains of Arg692, Asn700, Ser702, and Gln704, as well as main-chain amide groups of Lys699, Asn700, and Ser702. Alanine substitution of Q704 or replacement of residues Thr698-Ser702 in FnCas12a with the sequence Ala-Gly3 substantially reduced DNA cleavage activity, suggesting that these residues contribute to R-loop formation by stabilizing the displaced conformation of the nontarget DNA strand.

[0294] In the FnCas12a R-loop complex, the crRNA-target strand heteroduplex is terminated by a stacking interaction with a conserved aromatic residue (Tyr410). This prevents base pairing between the crRNA and the target strand beyond nucleotides U20 and dA(−20), respectively. Beyond this point, the target DNA strand nucleotides re-engage the non-target DNA strand, forming a PAM-distal DNA duplex comprising nucleotides dC(−21)−dA(−27) and dG21*−dT27*, respectively. The duplex is confined between the REC2 and Nuc domains at the end of the central channel formed by theREC and NUClobes.

[0295] Target DNA Cleavage:

[0296] FnCpf1 can independently accommodate both the target and non-target DNA strands in the catalytic pocket of the RuvC domain. The RuvC active site contains three catalytic residues (D917, E1006, and D1255). Structural observations suggest that both the target and non-target DNA strands are cleaved by the same catalytic mechanism in a single active site in Cas12a enzymes.

[0297] AsCf1

[0298] Structural characteristics of AsCpf1 include those described in Yamano et al., Crystal structure of Cpf1 in complex with guide RNA and target DNA, Cell 165, 949-962, May 5, 2016.

[0299] Overall Structure:

[0300] AsCpf1 adopts a bilobed architecture consisting of an a-helical recognition (REC) lobe and a nuclease (NUC) lobe, with the crRNA-target DNA heteroduplex bound to the positively charged, central channel between the two lobes. The REC lobe consists of the REC1 and REC2 domains, whereas the NUC lobe consists of the RuvC domain and three additional domains, denoted A, B, and C. The REC1 domain comprises 13 α helices, and the REC2 domain comprises ten a helices and two β strands that form a small antiparallel sheet. Domains A and B play functional roles similar to those of the WED(Wedge) and PI (PAM-interacting) domains of Cas9 (Anders et al., 2014; Nishimasu et al., 2015; Hirano et al., 2016). Domain C is involved in DNA cleavage. Thus, domains A, B, and C are referred to as theWED,PI, and Nuc domains, respectively. The WED domain is assembled from three separate regions (WED-I-III) in the Cpf1 sequence. The WED domain can be divided into a core subdomain comprising a nine-stranded, distorted antiparallel β sheet (β1-β8 and (β11) flanked by seven a helices (α1-α6 and α9) and a subdomain comprising two β strands (β9 and β10) and two α helices (α7 and α8). The PI domain comprises seven a helices (α1-α7) and a β hairpin (β1 and β2) and is inserted between the WED-II and WED-III regions, whereas the REC lobe is inserted between the WED-I and WED-II regions. The RuvC domain contains the three motifs (RuvC-I-III) that form the endonuclease active center. A characteristic helix (referred to as the bridge helix) is located between the RuvC-I and RuvC-II motifs and connects the REC and NUC lobes. The Nuc domain is inserted between the RuvC-II and RuvC-III motifs.

[0301] crRNA and DNA Target Recognition:

[0302] The 5′ handle of the crRNA is bound at the groove between the WED and RuvC domains. The U(−1), U(−16) base pair in the 5′ handle is recognized by the WED domain in a base-specific manner. U(−1) and U(−16) hydrogen bond with His761 and Arg18/Asn759, respectively, while U(−1) stacks on His761. The N6 of A(−19) hydrogen bonds with Leu807 and Asn808, while the base moieties of A(−18) and A(−19) form stacking interactions with Ile858 and Met806, respectively. Moreover, the phosphodiester backbone of the 5′ handle forms an extensive network of interactions with the WED and RuvC domains.

[0303] Recognition of the crRNA-Target DNA Heteroduplex:

[0304] The crRNA-target DNA heteroduplex is accommodated within the positively charged, central channel formed by the REC1, REC2, and RuvC domains and is recognized by the protein in a sequence-independent manner. The PAM-distal and PAM-proximal regions of the heteroduplex are recognized by the REC1-REC2 domains and the WED-REC1-RuvC domains, respectively. Arg951 and Arg955 in the bridge helix interact with the sugar-phosphate backbone of the target DNA strand. Notably, the sugar-phosphate backbone of the nucleotides G1-A8 in the crRNA forms multiple contacts with the WED and REC1 domains, and the base pairing within the 5-bp PAM-proximal “seed” region is important for Cpf1-mediated DNA cleavage. In addition, the backbone phosphate group between dT(−1) and dC1 of the target DNA strand (referred to as the +1 phosphate) is recognized by the side chain of Lys780 and the main-chain amide group of Gly783. This interaction results in the rotation of the +1 phosphate group, thereby facilitating base pairing between dC1 in the target DNA strand and G1 in the crRNA. The residues involved in the heteroduplex recognition are conserved in most members of the Cpf1 family (Zetsche et al., 2015), and the R176A, R192A, G783P, and R951A mutants exhibited reduced activities, confirming their functional relevance.

[0305] Cpf1 recognizes the 20-bp RNA-DNA heteroduplex. The side chain of Trp382 in the REC2 domain forms a stacking interaction with the C20:dG20 base pair in the heteroduplex and thus prevents base pairing between A21 and dT21. Indeed, the W382A mutant showed reduced activity, highlighting its functional importance.

[0306] PAM Recognition:

[0307] The PAM duplex adopts a distorted conformation with a narrow minor groove and is bound to the groove formed by the WED, REC1, and PI domains. The PAM duplex is recognized by the WED-REC1 and PI domains from the major and minor groove sides, respectively. The dT(−1):dA(−1*) base pair in the PAM duplex does not form base-specific contacts with the protein, consistent with the lack of specificity in the fourth position of the 5′-TTTN-3′ PAM. Lys607 in the PI domain is inserted into the narrow minor groove and plays critical roles in the PAM recognition. The 02 of dT(−2*) forms a hydrogen bond with the side chain of Lys607, whereas the nucleobase and deoxyribose moieties of dA(−2) form van der Waals interactions with the side chains of Lys607 and Pro599/Met604, respectively. The 5-methyl group of dT(−3*) forms a van der Waals interaction with the side-chain methyl group of Thr167, whereas the N3 and N7 of dA(−3) form hydrogen bonds with Lys607 and Lys548, respectively. The 5-methyl group of dT(−4*) is surrounded by the side-chain methyl groups of Thr167 and Thr539, whereas the 04′ of dA(−4) forms a hydrogen bond with the side chain of Lys607. Notably, the N3 and 04 of dT(−4*) form hydrogen bonds with the N1 of dA(−4) and the N6 of dA(−3), respectively. The K548A and M604A mutants exhibited reduced activities, confirming that Lys548 and Met604 participate in the PAM recognition. Further, the K607A mutant showed almost no activity, indicating that Lys607 is critical for the PAM recognition.

[0308] Nuclease Domains:

[0309] The RuvC domain comprises a typical RNase H fold, consisting

[0310] of a five-stranded mixed β sheet (β1-β5) flanked by three α helices (α1-α3), and two additional a helices and three β strands. The conserved, negatively charged residues Asp908, Glu993, and Asp1263 form an active site. The D908A and E993A mutants had almost no activity, whereas the D1263A mutant exhibited significantly reduced activity, confirming the roles of Asp908, Glu993, and Asp1263 in DNA cleavage. Notably, the bridge helix is inserted between strand β3 and helix α1 in the RNase H fold and interacts with the REC2 domain. The main-chain carbonyl group of Gln956 in the bridge helix forms a hydrogen bond with the side chain of Lys468 in the REC2 domain. In addition, Trp958 in the RuvC domain is accommodated in the hydrophobic pocket formed by Leu467, Leu471, Tyr514, Arg518, Ala521, and Thr522 in the REC2 domain. These observations highlight the functional importance of the bridge helix-mediated interaction between the REC and NUC lobes.

[0311] The crystal structure revealed the presence of the Nuc domain, which is inserted between the RuvC-II (strand 135) and RuvC-III (helix c3) motifs in the RuvC domain. The Nuc domain is connected to the RuvC domain via two linker loops (referred to as L1 and L2). The Nuc domain comprises five a helices and nine β strands and lacks detectable structural or sequence similarity to any known nucleases or proteins. Notably, the conserved polar residues Arg1226 and Asp1235 and the partially conserved Ser1228 are clustered in the proximity of the active site of the RuvC domain. The S1228A mutant showed DNA cleavage activity comparable to that of wild-type AsCpf1. In contrast, the D1235A mutant exhibited reduced activity, whereas the R1226A mutant showed almost no activity, indicating that Arg1226 is critical for DNA cleavage. Further characterization revealed that the R1226A mutant acts as a nickase that cleaves the non-target DNA strand, but not the target strand, indicating that the Nuc and RuvC domains cleave the target and non-target DNA strands, respectively. The mutations of the catalytic residues in the AsCpf1 RuvC domain abolished the cleavage of both DNA strands, suggesting that the cleavage of the non-target strand by the RuvC domain is a prerequisite for the target strand cleavage by the Nuc domain.

### LbuCas13a

[0312] Structural characteristics of LbuCas13a include those described in Liu et al., The molecular architecture for RNA-guided RNA cleavage by Cas13a, Cell 170, 714-726, Aug. 10, 2017.

[0313] Overall Structure:

[0314] LbuCas13a adopts a bilobed architecture consisting of an a-helical REC lobe and a NUC lobe, with the repeat region of the crRNA anchored in the REC lobe and the guide-target RNA duplex bound within the channel in the NUC lobe. The REC lobe consists of the NTD and Helical-1 domains, and the NUC lobe comprises two conserved HEPN domains, a Linker and the Helical-2 domain. The Helical-1 domain in LbuCas13a is comprised of ten a helices, while the HEPN1 domain is composed of two HEPN1 motifs (HEPN1 I-II) connected by the helical-2 domain. The Linker, which connects the two HEPN domains, is 133 amino acids in length.

[0315] crRNA-Target RNA Duplex Recognition:

[0316] The 28-bp guide-target RNA duplex is accommodated within a positively charged, central channel within the NUC lobe. The NUC lobe forms a nearly closed half-fist architecture with the duplex lying in the cleft between the fingers and the palm. Two α helices of the Linker domain and a β-hairpin of the HEPN2 domain extend over the channel to the Helical-2 domain, acting to lock the RNA duplex into the binding channel, like a thumb positioned on the fingers locks a half-fist. Base pairs 1-24 in the duplex are mostly surrounded by the NUC lobe, being primarily stabilized by the Helical-2 domain, the HEPN1 domain, and Linker region in a sequence-independent manner.

[0317] The guide region forms multiple contacts with LbuCas13a. The bases are splayed apart at the C(−1)-A1 step in the crRNA, with the Watson-Crick base pair A1:U10 stacking onto the side chains of Lys5 and Lys2 and the C(−1) base stacking on the A(−8) base. The sugar-phosphate backbone of crRNA nucleotides U8-A15 forms extensive contacts with the Helical-2, Linker, and HEPN1 domains. Notably, the alanine substituted for Lys558, which contacts the phosphate group of the eighth guide nucleotide, dramatically reduced crRNA-guided RNA cleavage by LbuCas13a, indicating its functional importance. The Tyr601Ala, Arg809Ala, Lys942Ala, and Tyr938Ala mutants also showed reduced target RNA cleavage activity, confirming their functional relevance. In addition, the phosphate-sugar backbone of nucleotides 18-24 in the guide strand make contacts with the Helical-2 and Linker domains, and Lys718Ala and Lys845Ala mutants showed reduced target RNA cleavage activity, suggesting that interactions between the guide and LbuCas13a play critical roles in the crRNA-guided RNA cleavage.

[0318] The target RNA strand mainly interacts with the Helical-2, Linker, and HEPN1 domains via the sugar-phosphate backbone of nucleotides G110-A210. Nucleotides G20 and U30 within the target RNA contact the side chains of Arg41 and Lys86 within the NTD domain. The Arg11135Ala and Gln519Ala mutants exhibit reduced cleavage activities, suggesting that interactions between target RNA and LbuCas13a are essential for crRNA-guided RNA cleavage.

[0319] Enzyme Activation:

[0320] The two conserved HEPN domains of LbuCas13a are folded closely together to form a concave surface containing the catalytic site for RNA-guided RNA cleavage. The activate site is composed of catalytic residues Arg472 and His477 from HEPN1 and Arg1048 and His1053 from HEPN2. Cas13a is able to cleave target RNA with a complementary sequence, as well as collateral RNA upon target RNA binding. The LbuCas13a crRNA-target RNA ternary complex has an active catalytic site, with the catalytic residues being located in close proximity, whereas the HEPN catalytic site of the crRNA-bound binary complex is maintained in a catalytically inactive state, with the catalytic residues located far apart from each other. In effect, the target RNA is an activator, activating the catalytic site within the two HEPN domains by forming a duplex with the guide region of the crRNA and bringing the catalytic residues into close proximity. The activated HEPN catalytic site likely cleaves ssRNA non-specifically.

[0321] RNA Cleavage:

[0322] In the LbuCas13a-crRNA-target RNA ternary complex, the nucleotide G290 in the target RNA strand, immediately upstream of the dsRNA duplex, is flipped out of the helical stack, pointing directly away from the duplex. Intriguingly, nucleotide G290 inserts into the HEPN catalytic site of the neighboring LbuCas13a (the second complex in the same asymmetric unit [ASU]). The base of G290 is held in place by residues Phe995 and His473, through aromatic stacking, and His477 and Gln1007 of the neighboring LbuCas13a molecule via hydrogen bonds. In addition, a β-hairpin within the HEPN1 domain from this neighboring LbuCas13a extends into the major groove of the guide-target RNA duplex, enhancing the contacts between the neighboring LbuCas13a and the target RNA by Van der Waals interaction. Substitution of residues His473, Phe995, Asn997, and Lys998 with alanine significantly reduced the cleavage of both target and non-target ssRNA substrate, and truncation of this β-hairpin reduces the ssRNA cleavage suggesting that the interaction between the target RNA and the HEPN domains is essential for cleavage.

[0323] crRNA Processing:

[0324] Cas13a cleaves pre-crRNA between nucleotides A(−31) and G(−30), generating mature crRNA using a cleavage site that is distinct from that used in RNA-guided ssRNA cleavage. Interactions between nucleotides (−31)-(−30) and the HEPN2 domain are essential for pre-crRNA processing. Five nucleotides G(_31)-C(_27) can be observed in the binary complex, but G(−31) is disordered in the ternary complex. The 5′-flank (nucleotides from G[-31] to C[−27]) is flipped out of the helical stack of the crRNA stem and points in a direction at right angles to that of nucleotide A(−26). The 5′-handle lies in the cleft formed between the Helical-1 and HEPN2 domains. The base G(−29) stacks on the side chain of Ile1104, resulting in a link between nucleotides A(−29)-G(−30). The phosphate group between nucleotides A(−29) and G(−30) is stabilized by Lys319 and Arg322 within the Helical-1 domain and base G(−30) stacks on the side chain of Arg322. A single-point mutation at residue Arg322 reduced pre-crRNA processing, and mutations at residues Lys319 and Lys321 had minimal effect. The phosphate group between nucleotide G(−31) and G(−30) contacts the side chains of Arg1072, Arg1079, and Lys1082 via hydrogen bonds and electronic interactions, suggesting that these amino acids play important roles for pre-crRNA processing. The side chain of Lys1108 is located near the nucleotide G(−31). Of note, single-point mutations of Arg1079 and Lys1108 abolished pre-crRNA cleavage, and mutation of Arg1072 and Lys1082 significantly reduced cleavage. Removal of the side chains of Arg1079, Arg1072, and Lys1082 significantly reduce pre-crRNA cleavage.

### BthC2c1

[0325] Structural characteristics of BthC2c1 include those described in Wu et al., Structural basis of stringent PAM recognition by CRISPR-C2c1 in complex with sgRNA, Cell Research 27, 705-708 (2017).

[0326] Overall Structure:

[0327] BthC2c1 has a bi-lobed architecture composed of an α-helical recognition (REC) lobe and a nuclease (NUC) lobe. The REC lobe consists of a PAM-interacting (PI) domain, a REC1 domain, a REC2 domain, and a long a helix referred to as the bridge helix (BH). The NUC lobe contains an OBD domain, a RuvC domain, and a domain with unknown functions (termed “UK” domain). The RuvC domain in the NUC lobe, composed by three split RuvC motifs (RuvC I-III), interfaces with the REC2 domain in the REC lobe The interaction between the RuvC domain and REC1 domain is mainly mediated by the UK domain. The α helix of BH forms α-helical bundle with those of the REC2 domain to recognize the sgRNA and target DNA heteroduplex at one side. The other side of the heteroduplex is recognized by the REC2 domain, to form a positively charged surface that interacts with the 3′ tail of the sgRNA.

[0328] sgRNA:Target DNA Heteroduplex Recognition:

[0329] The PI domain and the N-terminal region of the REC1 domain interact with the PAM-proximal region of the heteroduplex, whereas the C-terminal regions of the REC1 and REC2 domains interact with the PAM-distal region of the heteroduplex. The negatively charged sgRNA:target DNA heteroduplex is accommodated in the positively charged channel at the interface formed by REC and NUC lobes. Recognition of the sgRNA:target DNA heteroduplex by BthC2c1 is mainly through interactions between sugar-phosphate backbone and the protein. The PAM-distal region (A13-U19) of the sgRNA interacts with the two REC domains (Lys752, Arg768, Val767, Gly765, Asp279, Tyr333, Gln323, and Lys320), whereas the sugar-phosphate backbone of the target DNA sequence (dT(13′)-dA(19′)) complementary to that of PAM-distal guide segment is extensively recognized by the two REC domains (Arg769, Arg272, Thr280, Asn282, Arg294, and Arg328) and the RuvC domain (Arg841). The repeat:anti-repeat duplex containing an anticipated base-pairing segment (U(−6):G(−25)-G(−13):C(−18)) and an unanticipated base-pairing segment (C(−1):G(−61)-A(−5):U(−57)), is recognized by OBD (Glu412, Lys415, Leu414, Lys413, Asn452, Try451, Arg448, Arg507, and Lys9) and REC2 (Lys813, Tyr808, Lys794, Trp815, Lys793, Asn743, His783, and Asp790) domains.

[0330] PAM Recognition:

[0331] The 5′-ATTC-3′ PAM duplex is sandwiched between the OBD and PI domains. The OBD domain consists of a β-sheet barrel flanked by four short-helices, whereas the PI domain is composed of a bundle of four α-helices connected by linkers and loop PL1 (Ser129-Arg143). The loop PL1 deeply inserts into the minor groove of PAM duplex and interacts with the target and non-target DNA strands. Ser137, Lys141, and Arg140 from the loop PL1 hydrogen-bonds with the sugar-phosphate backbone of dC(−6′), dC(−5′), and dA(−2′), respectively. The sugar-phosphate backbone of PAM in the non-target DNA strand is recognized by Ser211, Val212, Ser129, Gln130, Gly132, Trp162, and Arg143 via hydrogen-bonding interactions. The 02 and 04 of dT(−2*) and the 06 of dG(−1′) form hydrogen bonds with Arg140 and Asn118, respectively. In addition, the N3 of dA(−2′) is also recognized by the side chain of Arg140. Another loop (L1, residues Ser395-Asn400) from OBD recognizes the PAM duplex from the major groove side, through the hydrogen bonds between Ser397 and the N6 of dA(−4*), and N6 and N7 of dA(−3′), and those between Asn398 and N6 of dA(−3′), and N6 and N7 of dA(−2). Mutations of these PI residues largely reduced the DNA cleavage activity of BthC2c1 in vitro, further supporting the structural observation. In addition, residues Ser138 and Gly139 from loop PL1 are located right at the bottom of the minor groove of PAM duplex. Replacement of them by bulkier residues could cause steric repulsion between loop PL1 and PAM bases; indeed, the S138Y and G139T mutations significantly impaired the DNA cleavage activity of BthC2c1. These structural and biochemical data indicate that BthC2c1 has stringent specificity for PAM.

[0332] Stem loop recognition: The phosphate backbone of stem loop 1 (C(−74)-G(−104)) is recognized by the REC, BH, RuvC, and UK domains. The flipped-out bases of A(−100) and G(−99) are recognized by Lys619 via hydrogen-bonding and Tyr808 via stacking interaction, respectively. G(−86) is extensively recognized by Arg613, His802, and Asn819. Stem loop 1 does not affect the cleavage activity of BthC2c1; in vitro cleavage assay confirmed that the DNA cleavage activity of BthC2c1 guided by a stem loop 1-truncated sgRNA is comparable to that of full-length sgRNA, whereas BthC2c1 guided by an sgRNA with longer truncation (33-end) failed to efficiently cleave substrate DNA. In addition, tetraloop is also not necessary for BthC2c1's cleavage activity; the DNA cleavage activity of BthC2c1 guided by a tetraloop-truncated-mutant sgRNA (A85-92/GAA) is comparable to that of full-length sgRNA.

### Methods for Identifying New CRISPR-Cas Loci

[0333] The Cpf1 gene is found in several diverse bacterial genomes, typically in the same locus with cas1, cas2, and cas4 genes and a CRISPR cassette (for example, FNFX1_1431-FNFX1_1428 of Francisella cf. novicida Fx1). Thus, the layout of this novel CRISPR-Cas system appears to be similar to that of type II-B. Furthermore, similar to Cas9, the Cpf1 protein contains a readily identifiable C-terminal region that is homologous to the transposon ORF-B and includes an active RuvC-like nuclease, an arginine-rich region, and a Zn finger (absent in Cas9). However, unlike Cas9, Cpf1 is also present in several genomes without a CRISPR-Cas context and its relatively high similarity with ORF-B suggests that it might be a transposon component. It was suggested that if this was a genuine CRISPR-Cas system and Cpf1 is a functional analog of Cas9 it would be a novel CRISPR-Cas type, namely type V (See Annotation and Classification of CRISPR-Cas Systems. Makarova K S, Koonin E V. Methods Mol Biol. 2015; 1311:47-75). However, as described herein, Cpf1 is denoted to be in subtype V-A to distinguish it from C2c1p which does not have an identical domain structure and is hence denoted to be in subtype V-B. The application describes methods for using CRISPR-Cas proteins in therapy. This is exemplified herein with Cpf1, whereby a number of Cpf1 orthologs or homologs have been identified. It will be apparent to the skilled person that further Cpf1 orthologs or homologs can be identified and that any of the functionalities described herein may be engineered into other Cpf1 orthologs, including chimeric enzymes comprising fragments from multiple orthologs.

[0334] For instance, computational methods of identifying novel CRISPR-Cas loci are described in EP3009511 or US2016208243 and may comprise the following steps: detecting all contigs encoding the Cas1 protein; identifying all predicted protein coding genes within 20 kB of the cas1 gene; comparing the identified genes with Cas protein-specific profiles and predicting CRISPR arrays; selecting unclassified candidate CRISPR-Cas loci containing proteins larger than 500 amino acids (>500 aa); analyzing selected candidates using methods such as PSI-BLAST and HHPred to screen for known protein domains, thereby identifying novel Class 2 CRISPR-Cas loci (see also Schmakov et al. 2015, Mol Cell. 60(3):385-97). In addition to the above mentioned steps, additional analysis of the candidates may be conducted by searching metagenomics databases for additional homologs. Additionally or alternatively, to expand the search to non-autonomous CRISPR-Cas systems, the same procedure can be performed with the CRISPR array used as the seed.

[0335] In one aspect the detecting all contigs encoding the Cas1 protein is performed by GenemarkS which a gene prediction program as further described in “GeneMarkS: a self-training method for prediction of gene starts in microbial genomes. Implications for finding sequence motifs in regulatory regions.” John Besemer, Alexandre Lomsadze and Mark Borodovsky, Nucleic Acids Research (2001) 29, pp 2607-2618, herein incorporated by reference.

[0336] In one aspect the identifying all predicted protein coding genes is carried out by comparing the identified genes with Cas protein-specific profiles and annotating them according to NCBI Conserved Domain Database (CDD) which is a protein annotation resource that consists of a collection of well-annotated multiple sequence alignment models for ancient domains and full-length proteins. These are available as position-specific score matrices (PSSMs) for fast identification of conserved domains in protein sequences via RPS-BLAST. CDD content includes NCBI-curated domains, which use 3D-structure information to explicitly define domain boundaries and provide insights into sequence/structure/function relationships, as well as domain models imported from a number of external source databases (Pfam, SMART, COG, PRK, TIGRFAM). In a further aspect, CRISPR arrays were predicted using a PILER-CR program which is a public domain software for finding CRISPR repeats as described in “PILER-CR: fast and accurate identification of CRISPR repeats”, Edgar, R. C., BMC Bioinformatics, January 20; 8:18(2007), herein incorporated by reference.

[0337] In a further aspect, the case by case analysis is performed using PSI-BLAST (Position-Specific Iterative Basic Local Alignment Search Tool). PSI-BLAST derives a position-specific scoring matrix (PSSM) or profile from the multiple sequence alignment of sequences detected above a given score threshold using protein-protein BLAST. This PSSM is used to further search the database for new matches, and is updated for subsequent iterations with these newly detected sequences. Thus, PSI-BLAST provides a means of detecting distant relationships between proteins.

[0338] In another aspect, the case by case analysis is performed using HHpred, a method for sequence database searching and structure prediction that is as easy to use as BLAST or PSI-BLAST and that is at the same time much more sensitive in finding remote homologs. In fact, HHpred's sensitivity is competitive with the most powerful servers for structure prediction currently available. HHpred is the first server that is based on the pairwise comparison of profile hidden Markov models (HMMs). Whereas most conventional sequence search methods search sequence databases such as UniProt or the NR, HHpred searches alignment databases, like Pfam or SMART. This greatly simplifies the list of hits to a number of sequence families instead of a clutter of single sequences. All major publicly available profile and alignment databases are available through HHpred. HHpred accepts a single query sequence or a multiple alignment as input. Within only a few minutes it returns the search results in an easy-to-read format similar to that of PSI-BLAST. Search options include local or global alignment and scoring secondary structure similarity. HHpred can produce pairwise query-template sequence alignments, merged query-template multiple alignments (e.g. for transitive searches), as well as 3D structural models calculated by the MODELLER software from HHpred alignments.

[0339] In certain example embodiments, methods for identifying novel CRISPR loci may include comparison to properties and elements of known CRISPR loci. Example methods are disclosed in U.S. Provisional Application No. 62/376,387 filed Aug. 17, 2016 and entitled “Methods for identifying Class 2 CRISPR-Cas systems,” U.S. Provisional Application No. 62/376,383 filed Aug. 17, 2016 and entitled “Methods for Identifying Novel Gene Editing Elements,” and Shmakov et al. “Diversity and evolution of class 2 CRISPR-Cas systems,” Nat Rev Microbiol. 2017 15(3):169-182. Finally, methods such as those disclosed above may also be adaptive to identify genomic structures comprising repeating motifs in general as opposed to specific known CRISPR objects such as Cas9 or Cpf1.

[0340] It should be further recognized that putative novel CRISPR-Cas loci may be further discovered and or integrated, in particular for relevant nuclease activity, using the methods disclosed in the section below under the header “Methods for determining on/off target activity and selecting suitable sequences/guides.”

### Determination of PAM

[0341] Determination of PAM can be ensured as follows This experiment closely parallels similar work in E. coli for the heterologous expression of StCas9 (Sapranauskas, R. et al. Nucleic Acids Res 39, 9275-9282 (2011)). Applicants introduce a plasmid containing both a PAM and a resistance gene into the heterologous E. coli, and then plate on the corresponding antibiotic. If there is DNA cleavage of the plasmid, Applicants observe no viable colonies.

[0342] In further detail, the assay is as follows for a DNA target. Two E. coli strains are used in this assay. One carries a plasmid that encodes the endogenous effector protein locus from the bacterial strain. The other strain carries an empty plasmid (e.g.pACYC184, control strain). All possible 7 or 8 bp PAM sequences are presented on an antibiotic resistance plasmid (pUC19 with ampicillin resistance gene). The PAM is located next to the sequence of proto-spacer 1 (the DNA target to the first spacer in the endogenous effector protein locus). Two PAM libraries were cloned. One has a 8 random bp 5′ of the proto-spacer (e.g. total of 65536 different PAM sequences=complexity). The other library has 7 random bp 3′ of the proto-spacer (e.g. total complexity is 16384 different PAMs). Both libraries were cloned to have in average 500 plasmids per possible PAM. Test strain and control strain were transformed with 5′PAM and 3′PAM library in separate transformations and transformed cells were plated separately on ampicillin plates. Recognition and subsequent cutting/interference with the plasmid renders a cell vulnerable to ampicillin and prevents growth. Approximately 12 h after transformation, all colonies formed by the test and control strains where harvested and plasmid DNA was isolated. Plasmid DNA was used as template for PCR amplification and subsequent deep sequencing. Representation of all PAMs in the untransformed libraries showed the expected representation of PAMs in transformed cells. Representation of all PAMs found in control strains showed the actual representation. Representation of all PAMs in test strain showed which PAMs are not recognized by the enzyme and comparison to the control strain allows extracting the sequence of the depleted PAM.

### Codon Optimized Nucleic Acid Sequences

[0343] The proteins (e.g., Cas proteins) herein may be codon optimized. Where the effector protein is to be administered as a nucleic acid, the application envisages the use of codon-optimized Cas. An example of a codon optimized sequence, is in this instance a sequence optimized for expression in a eukaryote, e.g., humans (i.e. being optimized for expression in humans), or for another eukaryote, animal or mammal as herein discussed; see, e.g., SaCas9 human codon optimized sequence in WO 2014/093622 (PCT/US2013/074667) as an example of a codon optimized sequence (from knowledge in the art and this disclosure, codon optimizing coding nucleic acid molecule(s), especially as to effector protein is within the ambit of the skilled artisan). Whilst this is preferred, it will be appreciated that other examples are possible and codon optimization for a host species other than human, or for codon optimization for specific organs is known. In some embodiments, an enzyme coding sequence encoding a DNA/RNA-targeting Cas protein is codon optimized for expression in particular cells, such as eukaryotic cells. The eukaryotic cells may be those of or derived from a particular organism, such as a plant or a mammal, including but not limited to human, or non-human eukaryote or animal or mammal as herein discussed, e.g., mouse, rat, rabbit, dog, livestock, or non-human mammal or primate. In some embodiments, processes for modifying the germ line genetic identity of human beings and/or processes for modifying the genetic identity of animals which are likely to cause them suffering without any substantial medical benefit to man or animal, and also animals resulting from such processes, may be excluded. In general, codon optimization refers to a process of modifying a nucleic acid sequence for enhanced expression in the host cells of interest by replacing at least one codon (e.g., about or more than about 1, 2, 3, 4, 5, 10, 15, 20, 25, 50, or more codons) of the native sequence with codons that are more frequently or most frequently used in the genes of that host cell while maintaining the native amino acid sequence. Various species exhibit particular bias for certain codons of a particular amino acid. Codon bias (differences in codon usage between organisms) often correlates with the efficiency of translation of messenger RNA (mRNA), which is in turn believed to be dependent on, among other things, the properties of the codons being translated and the availability of particular transfer RNA (tRNA) molecules. The predominance of selected tRNAs in a cell is generally a reflection of the codons used most frequently in peptide synthesis. Accordingly, genes can be tailored for optimal gene expression in a given organism based on codon optimization. Codon usage tables are readily available, for example, at the “Codon Usage Database” available at www.kazusa.orjp/codon/ and these tables can be adapted in a number of ways. See Nakamura, Y., et al. “Codon usage tabulated from the international DNA sequence databases: status for the year 2000” Nucl. Acids Res. 28:292 (2000). Computer algorithms for codon optimizing a particular sequence for expression in a particular host cell are also available, such as Gene Forge (Aptagen; Jacobus, Pa.), are also available. In some embodiments, one or more codons (e.g., 1, 2, 3, 4, 5, 10, 15, 20, 25, 50, or more, or all codons) in a sequence encoding a DNA/RNA-targeting Cas protein corresponds to the most frequently used codon for a particular amino acid. As to codon usage in yeast, reference is made to the online Yeast Genome database available at www.yeastgenome.org/community/codon_usage.shtml, or Codon selection in yeast, Bennetzen and Hall, J Biol Chem. 1982 Mar. 25; 257(6):3026-31. As to codon usage in plants including algae, reference is made to Codon usage in higher plants, green algae, and cyanobacteria, Campbell and Gowri, Plant Physiol. 1990 January; 92(1): 1-11.; as well as Codon usage in plant genes, Murray et al, Nucleic Acids Res. 1989 Jan. 25; 17(2):477-98; or Selection on the codon bias of chloroplast and cyanelle genes in different plant and algal lineages, Morton B R, J Mol Evol. 1998 April; 46(4):449-59.

### Modified Cas Proteins

### Modified Cpf1

[0344] In particular embodiments, it is of interest to make use of an engineered Cpf1 protein as defined herein, such as Cpf1, wherein the protein complexes with a nucleic acid molecule comprising RNA to form a CRISPR complex, wherein when in the CRISPR complex, the nucleic acid molecule targets one or more target polynucleotide loci, the protein comprises at least one modification compared to unmodified Cpf1 protein, and wherein the CRISPR complex comprising the modified protein has altered activity as compared to the complex comprising the unmodified Cpf1 protein. It is to be understood that when referring herein to CRISPR “protein”, the Cpf1 protein preferably is a modified CRISPR enzyme (e.g. having increased or decreased (or no) enzymatic activity, such as without limitation including Cpf1. The term “CRISPR protein” may be used interchangeably with “CRISPR enzyme”, irrespective of whether the CRISPR protein has altered, such as increased or decreased (or no) enzymatic activity, compared to the wild type CRISPR protein.

[0345] Computational analysis of the primary structure of Cpf1 nucleases reveals three distinct regions. First a C-terminal RuvC like domain, which is the only functional characterized domain. Second a N-terminal alpha-helical region and third a mixed alpha and beta region, located between the RuvC like domain and the alpha-helical region.

[0346] Several small stretches of unstructured regions are predicted within the Cpf1 primary structure. Unstructured regions, which are exposed to the solvent and not conserved within different Cpf1 orthologs, are preferred sides for splits and insertions of small protein sequences. In addition, these sides can be used to generate chimeric proteins between Cpf1 orthologs.

[0347] In certain example embodiments, a modified Cpf1 protein comprises at least one modification that alters editing preference as compared to wild type. In certain example embodiments, the editing preference is for a specific insert or deletion within the target region. In certain example embodiments, the at least one modification increases formation of one or more specific indels. In certain example embodiments, the at least one modification is in a C-terminal RuvC like domain, the N-terminal alpha-helical region, the mixed alpha and beta region, or a combination thereof. In certain example embodiments the altered editing preference is indel formation. In certain example embodiments, the at least one modification increases formation of one or more specific insertions.

[0348] In certain example embodiments, the at least one modification increases formation of one or more specific insertions. In certain example embodiments, the at least one modification results in an insertion of an A adjacent to an A, T, G, or C in the target region. In another example embodiment, the at least one modification results in insertion of a T adjacent to an A, T, G, or C in the target region. In another example embodiment, the at least one modification results in insertion of a G adjacent to an A, T, G, or C in the target region. In another example embodiment, the at least one modification results in insertion of a C adjacent to an A, T, C, or G in the target region. The insertion may be 5′ or 3′ to the adjacent nucleotide. In one example embodiment, the one or more modification direct insertion of a T adjacent to an existing T. In certain example embodiments, the existing T corresponds to the 4th position in the binding region of a guide sequence. In certain example embodiments, the one or more modifications result in an enzyme which ensures more precise one-base insertions or deletions, such as those described above. More particularly, the one or more modifications may reduce the formations of other types of indels by the enzyme. The ability to generate one-base insertions or deletions can be of interest in a number of applications, such as correction of genetic mutants in diseases caused by small deletions, more particularly where HDR is not possible. For example correction of the F508del mutation in CFTR via delivery of three sRNA directing insertion of three T's, which is the most common genotype of cystic fibrosis, or correction of Alia Jafar's single nucleotide deletion in CDKL5 in the brain. As the editing method only requires NHEJ, the editing would be possible in post-mitotic cells such as the brain. The ability to generate one base pair insertions/deletions may also be useful in genome-wide CRISPR-Cas negative selection screens. In certain example embodiments, the at least one modification, is a mutation. In certain other example embodiment, the one or more modification may be combined with one or more additional modifications or mutations described below including modifications to increase binding specificity and/or decrease off-target effects.

[0349] In certain example embodiments, the engineered CRISPR-cas effector comprising at least one modification that alters editing preference as compared to wild type may further comprise one or more additional modifications that alters the binding property as to the nucleic acid molecule comprising RNA or the target polypeptide loci, altering binding kinetics as to the nucleic acid molecule or target molecule or target polynucleotide or alters binding specificity as to the nucleic acid molecule. Example of such modifications are summarized in the following paragraph. Based on the above information, mutants can be generated which lead to inactivation of the enzyme or which modify the double strand nuclease to nickase activity. In alternative embodiments, this information is used to develop enzymes with reduced off-target effects (described elsewhere herein)

[0350] In certain of the above-described Cpf1 enzymes, the enzyme is modified by mutation of one or more residues including but not limited to positions D917, E1006, E1028, D1227, D1255A, N1257, according to FnCpf1 protein or any corresponding ortholog. In an aspect the invention provides a herein-discussed composition wherein the Cpf1 enzyme is an inactivated enzyme which comprises one or more mutations selected from the group consisting of D917A, E1006A, E1028A, D1227A, D1255A, N1257A, D917A, E1006A, E1028A, D1227A, D1255A and N1257A according to FnCpf1 protein or corresponding positions in a Cpf1 ortholog. In an aspect the invention provides a herein-discussed composition, wherein the CRISPR enzyme comprises D917, or E1006 and D917, or D917 and D1255, according to FnCpf1 protein or a corresponding position in a Cpf1 ortholog.

[0351] In certain of the above-described Cpf1 enzymes, the enzyme is modified by mutation of one or more residues (in the RuvC domain) including but not limited to positions R909, R912, R930, R947, K949, R951, R955, K965, K968, K1000, K1002, R1003, K1009, K1017, K1022, K1029, K1035, K1054, K1072, K1086, R1094, K1095, K1109, K1118, K1142, K1150, K1158, K1159, R1220, R1226, R1242, and/or R1252 with reference to amino acid position numbering of AsCpf1 (Acidaminococcus sp. BV3L6).

[0352] In certain of the above-described non-naturally-occurring CRISPR enzymes, the enzyme is modified by mutation of one or more residues (in the RAD50) domain including but not limited positions K324, K335, K337, R331, K369, K370, R386, R392, R393, K400, K404, K406, K408, K414, K429, K436, K438, K459, K460, K464, R670, K675, R681, K686, K689, R699, K705, R725, K729, K739, K748, and/or K752 with reference to amino acid position numbering of AsCpf1 (Acidaminococcus sp. BV3L6).

[0353] In certain of the Cpf1 enzymes, the enzyme is modified by mutation of one or more residues including but not limited positions R912, T923, R947, K949, R951, R955, K965, K968, K1000, R1003, K1009, K1017, K1022, K1029, K1072, K1086, F1103, R1226, and/or R1252 with reference to amino acid position numbering of AsCpf1 (Acidaminococcus sp. BV3L6).

[0354] In certain embodiments, the Cpf1 enzyme is modified by mutation of one or more residues including but not limited positions R833, R836, K847, K879, K881, R883, R887, K897, K900, K932, R935, K940, K948, K953, K960, K984, K1003, K1017, R1033, R1138, R1165, and/or R1252 with reference to amino acid position numbering of LbCpf1 (Lachnospiraceae bacterium ND2006).

[0355] In certain embodiments, the Cpf1 enzyme is modified by mutation of one or more residues including but not limited positions K15, R18, K26, Q34, R43, K48, K51, R56, R84, K85, K87, N93, R103, N104, T118, K123, K134, R176, K177, R192, K200, K226, K273, K275, T291, R301, K307, K369, S404, V409, K414, K436, K438, K468, D482, K516, R518, K524, K530, K532, K548, K559, K570, R574, K592, D596, K603, K607, K613, C647, R681, K686, H720, K739, K748, K757, T766, K780, R790, P791, K796, K809, K815, T816, K860, R862, R863, K868, K897, R909, R912, T923, R947, K949, R951, R955, K965, K968, K1000, R1003, K1009, K1017, K1022, K1029, A1053, K1072, K1086, F1103, S1209, R1226, R1252, K1273, K1282, and/or K1288 with reference to amino acid position numbering of AsCpf1 (Acidaminococcus sp. BV3L6).

[0356] In certain embodiments, the enzyme is modified by mutation of one or more residues including but not limited positions K15, R18, K26, R34, R43, K48, K51, K56, K87, K88, D90, K96, K106, K107, K120, Q125, K143, R186, K187, R202, K210, K235, K296, K298, K314, K320, K326, K397, K444, K449, E454, A483, E491, K527, K541, K581, R583, K589, K595, K597, K613, K624, K635, K639, K656, K660, K667, K671, K677, K719, K725, K730, K763, K782, K791, R800, K809, K823, R833, K834, K839, K852, K858, K859, K869, K871, R872, K877, K905, R918, R921, K932, 1960, K962, R964, R968, K978, K981, K1013, R1016, K1021, K1029, K1034, K1041, K1065, K1084, and/or K1098 with reference to amino acid position numbering of FnCpf1 (Francisella novicida U112).

[0357] In certain embodiments, the enzyme is modified by mutation of one or more residues including but not limited positions K15, R18, K26, K34, R43, K48, K51, R56, K83, K84, R86, K92, R102, K103, K116, K121, R158, E159, R174, R182, K206, K251, K253, K269, K271, K278, P342, K380, R385, K390, K415, K421, K457, K471, A506, R508, K514, K520, K522, K538, Y548, K560, K564, K580, K584, K591, K595, K601, K634, K640, R645, K679, K689, K707, T716, K725, R737, R747, R748, K753, K768, K774, K775, K785, K787, R788, Q793, K821, R833, R836, K847, K879, K881, R883, R887, K897, K900, K932, R935, K940, K948, K953, K960, K984, K1003, K1017, R1033, K1121, R1138, R1165, K1190, K1199, and/or K1208 with reference to amino acid position numbering of LbCpf1 (Lachnospiraceae bacterium ND2006).

[0358] In certain embodiments, the enzyme is modified by mutation of one or more residues including but not limited positions K14, R17, R25, K33, M42, Q47, K50, D55, K85, N86, K88, K94, R104, K105, K118, K123, K131, R174, K175, R190, R198, 1221, K267, Q269, K285, K291, K297, K357, K403, K409, K414, K448, K460, K501, K515, K550, R552, K558, K564, K566, K582, K593, K604, K608, K623, K627, K633, K637, E643, K780, Y787, K792, K830, Q846, K858, K867, K876, K890, R900, K901, M906, K921, K927, K928, K937, K939, R940, K945, Q975, R987, R990, K1001, R1034, 11036, R1038, R1042, K1052, K1055, K1087, R1090, K1095, N1103, K1108, K1115, K1139, K1158, R1172, K1188, K1276, R1293, A1319, K1340, K1349, and/or K1356 with reference to amino acid position numbering of MbCpf1 (Moraxella bovoculi 237).

[0359] Recently a method was described for the generation of Cas9 orthologs with enhanced specificity (Slaymaker et al. 2015). This strategy can be used to enhance the specificity of Cpf1 orthologs. The following modifications are presently considered to provide enhanced Cpf1 specificity.

TABLE 7
Conserved Lysine and Arginine
residues within RuvC.

| AsCpf1 | LbCpf1 |
|---|---|
| R912 | R833 |
| T923 | R836 |
| R947 | K847 |
| K949 | K879 |
| R951 | K881 |
| R955 | R883 |
| K965 | R887 |
| K968 | K897 |
| K1000 | K900 |
| R1003 | K932 |
| K1009 | R935 |
| K1017 | K940 |
| K1022 | K948 |
| K1029 | K953 |
| K1072 | K960 |
| K1086 | K984 |
| F1103 | K1003 |
| R1226 | K1017 |
| R1252 | R1033 |
| | R1138 |
| | R1165 |

[0360] Additional candidates are positive charged residues that are conserved between different orthologs (Table 8).

TABLE 8
Conserved Lysine and Arginine residues

| Residue | AsCpf1 | FnCpf1 | LbCpf1 | MbCpf1 |
|---|---|---|---|---|
| Lys | K15 | K15 | K15 | K14 |
| Arg | R18 | R18 | R18 | R17 |
| Lys/Arg | K26 | K26 | K26 | R25 |
| Lys/Arg | Q34 | R34 | K34 | K33 |
| Arg | R43 | R43 | R43 | M42 |
| Lys | K48 | K48 | K48 | Q47 |
| Lys | K51 | K51 | K51 | K50 |
| Lys/Arg | R56 | K56 | R56 | D55 |
| Lys/Arg | R84 | K87 | K83 | K85 |
| Lys/Arg | K85 | K88 | K84 | N86 |
| Lys/Arg | K87 | D90 | R86 | K88 |
| Arg | N93 | K96 | K92 | K94 |
| Lys/Arg | R103 | K106 | R102 | R104 |
| Lys | N104 | K107 | K103 | K105 |
| Lys | T118 | K120 | K116 | K118 |
| Lys/Arg | K123 | Q125 | K121 | K123 |
| Lys | K134 | K143 | — | K131 |
| Arg | R176 | R186 | R158 | R174 |
| Lys | K177 | K187 | E159 | K175 |
| Arg | R192 | R202 | R174 | R190 |
| Lys/Arg | K200 | K210 | R182 | R198 |
| Lys | K226 | K235 | K206 | I221 |
| Lys | K273 | K296 | K251 | K267 |
| Lys | K275 | K298 | K253 | Q269 |
| Lys | T291 | K314 | K269 | K285 |
| Lys/Arg | R301 | K320 | K271 | K291 |
| Lys | K307 | K326 | K278 | K297 |
| Lys | K369 | K397 | P342 | K357 |
| Lys | S404 | K444 | K380 | K403 |
| Lys/Arg | V409 | K449 | R385 | K409 |
| Lys | K414 | E454 | K390 | K414 |
| Lys | K436 | A483 | K415 | K448 |
| Lys | K438 | E491 | K421 | K460 |
| Lys | K468 | K527 | K457 | K501 |
| Lys | D482 | K541 | K471 | K515 |
| Lys | K516 | K581 | A506 | K550 |
| Arg | R518 | R583 | R508 | R552 |
| Lys | K524 | K589 | K514 | K558 |
| Lys | K530 | K595 | K520 | K564 |
| Lys | K532 | K597 | K522 | K566 |
| Lys | K548 | K613 | K538 | K582 |
| Lys | K559 | K624 | Y548 | K593 |
| Lys | K570 | K635 | K560 | K604 |
| Lys/Arg | R574 | K639 | K564 | K608 |
| Lys | K592 | K656 | K580 | K623 |
| Lys | D596 | K660 | K584 | K627 |
| Lys | K603 | K667 | K591 | K633 |
| Lys | K607 | K671 | K595 | K637 |
| Lys | K613 | K677 | K601 | E643 |
| Lys | C647 | K719 | K634 | K780 |
| Lys/Arg | R681 | K725 | K640 | Y787 |
| Lys/Arg | K686 | K730 | R645 | K792 |
| Lys | H720 | K763 | K679 | K830 |
| Lys | K739 | K782 | K689 | Q846 |
| Lys | K748 | K791 | K707 | K858 |
| Lys/Arg | K757 | R800 | T716 | K867 |
| Lys/Arg | T766 | K809 | K725 | K876 |
| Lys/Arg | K780 | K823 | R737 | K890 |
| Arg | R790 | R833 | R747 | R900 |
| Lys/Arg | P791 | K834 | R748 | K901 |
| Lys | K796 | K839 | K753 | M906 |
| Lys | K809 | K852 | K768 | K921 |
| Lys | K815 | K858 | K774 | K927 |
| Lys | T816 | K859 | K775 | K928 |
| Lys | K860 | K869 | K785 | K937 |
| Lys/Arg | R862 | K871 | K787 | K939 |
| Arg | R863 | R872 | R788 | R940 |
| Lys | K868 | K877 | Q793 | K945 |
| Lys | K897 | K905 | K821 | Q975 |
| Arg | R909 | R918 | R833 | R987 |
| Arg | R912 | R921 | R836 | R990 |
| Lys | T923 | K932 | K847 | K1001 |
| Lys/Arg | R947 | I960 | K879 | R1034 |
| Lys | K949 | K962 | K881 | I1036 |
| Arg | R951 | R964 | R883 | R1038 |
| Arg | R955 | R968 | R887 | R1042 |
| Lys | K965 | K978 | K897 | K1052 |
| Lys | K968 | K981 | K900 | K1055 |
| Lys | K1000 | K1013 | K932 | K1087 |
| Arg | R1003 | R1016 | R935 | R1090 |
| Lys | K1009 | K1021 | K940 | K1095 |
| Lys | K1017 | K1029 | K948 | N1103 |
| Lys | K1022 | K1034 | K953 | K1108 |
| Lys | K1029 | K1041 | K960 | K1115 |
| Lys | A1053 | K1065 | K984 | K1139 |
| Lys | K1072 | K1084 | K1003 | K1158 |
| Lys/Arg | K1086 | K1098 | K1017 | R1172 |
| Lys/Arg | F1103 | K1114 | R1033 | K1188 |
| Lys | S1209 | K1201 | K1121 | K1276 |
| Arg | R1226 | R1218 | R1138 | R1293 |
| Arg | R1252 | R1244 | R1165 | A1319 |
| Lys | K1273 | K1265 | K1190 | K1340 |
| Lys | K1282 | K1274 | K1199 | K1349 |
| Lys | K1288 | K1281 | K1208 | K1356 |

[0361] Table 8 provides the positions of conserved Lysine and Arginine residues in an alignment of Cpf1 nuclease from Francisella novicida U112 (FnCpf1), Acidaminococcus sp. BV3L6 (AsCpf1), Lachnospiraceae bacterium ND2006 (LbCpf1) and Moraxella bovoculi 237 (MbCpf1). These can be used to generate Cpf1 mutants with enhanced specificity.

[0362] With a similar strategy used to improve Cas9 specificity, specificity of Cpf1 can be improved by mutating residues that stabilize the non-targeted DNA strand. This may be accomplished without a crystal structure by using linear structure alignments to predict 1) which domain of Cpf1 binds to which strand of DNA and 2) which residues within these domains contact DNA.

[0363] However, this approach may be limited due to poor conservation of Cpf1 with known proteins. Thus it may be desirable to probe the function of all likely DNA interacting amino acids (lysine, histidine and arginine).

[0364] Positively charged residues in the RuvC domain are more conserved throughout Cpf1s than those in the Rad50 domain indicating that RuvC residues are less evolutionarily flexible. This suggests that rigid control of nucleic acid binding is needed in this domain (relative to the Rad50 domain). Therefore, it is possible this domain cuts the targeted DNA strand because of the requirement for RNA:DNA duplex stabilization (precedent in Cas9). Furthermore, more arginines are present in the RuvC domain (5% of RuvC residues 904 to 1307 vs 3.8% in the proposed Rad50 domains) suggesting again that RuvC targets the DNA strand complexed with the guide RNA. Arginines are more involved in binding nucleic acid major and minor grooves (Rohs et al. Nature (2009): Vol 461: 1248-1254). Major/minor grooves would only be present in a duplex (such as DNA:RNA targeting duplex), further suggesting that RuvC cuts the “targeted strand”.

[0365] From these specific observations about AsCpf1 similar residues in Cpf1 may be identified from other species by sequence alignments. Alignments of AsCpf1 and FnCpf1, identify Rad50 binding domains and the Arginines and Lysines within.

[0366] Based on crystal structures of two similar domains as those found in Cpf1 (RuvC holiday junction resolvase and Rad50 DNA repair protein), it can be deduced what the relevant domains look like in Cpf1, and infer which regions and residues may contact DNA. In each structure residues are highlighted that contact DNA. The regions of AsCpf1 that correspond to these DNA binding regions are annotated. The list of residues in Table 9 are those found in the two binding domains.

TABLE 9
list of probable DNA interacting residues

| RuvC domain | Rad50 domain |
|---|---|
| probable DNA | probable DNA |
| interacting residues: | interacting residues: |
| AsCpf1 | AsCpf1 |
| R909 | K324 |
| R912 | K335 |
| R930 | K337 |
| R947 | R331 |
| K949 | K369 |
| R951 | K370 |
| R955 | R386 |
| K965 | R392 |
| K968 | R393 |
| K1000 | K400 |
| K1002 | K404 |
| R1003 | K406 |
| K1009 | K408 |
| K1017 | K414 |
| K1022 | K429 |
| K1029 | K436 |
| K1035 | K438 |
| K1054 | K459 |
| K1072 | K460 |
| K1086 | K464 |
| R1094 | R670 |
| K1095 | K675 |
| K1109 | R681 |
| K1118 | K686 |
| K1142 | K689 |
| K1150 | R699 |
| K1158 | K705 |
| K1159 | R725 |
| R1220 | K729 |
| R1226 | K739 |
| R1242 | K748 |
| R1252 | K752 |
| | R670 |

### Deactivated/Inactivated Cpf1 Protein

[0367] Where the Cpf1 protein has nuclease activity, the Cpf1 protein may be modified to have diminished nuclease activity e.g., nuclease inactivation of at least 70%, at least 80%, at least 90%, at least 95%, at least 97%, or 100% as compared with the wild type enzyme; or to put in another way, a Cpf1 enzyme having advantageously about 0% of the nuclease activity of the non-mutated or wild type Cpf1 enzyme or CRISPR enzyme, or no more than about 3% or about 5% or about 10% of the nuclease activity of the non-mutated or wild type Cpf1 enzyme, e.g. of the non-mutated or wild type Francisella novicida U112 (FnCpf1), Acidaminococcus sp. BV3L6 (AsCpf1), Lachnospiraceae bacterium ND2006 (LbCpf1) or Moraxella bovoculi 237 (MbCpf1 Cpf1 enzyme or CRISPR enzyme. This is possible by introducing mutations into the nuclease domains of the Cpf1 and orthologs thereof.

[0368] In certain embodiments, the CRISPR enzyme is engineered and can comprise one or more mutations that reduce or eliminate a nuclease activity. The amino acid positions in the FnCpf1p RuvC domain include but are not limited to D917A, E1006A, E1028A, D1227A, D1255A, N1257A, D917A, E1006A, E1028A, D1227A, D1255A and N1257A. Applicants have also identified a putative second nuclease domain which is most similar to PD-(D/E)XK nuclease superfamily and HincII endonuclease like. The point mutations to be generated in this putative nuclease domain to substantially reduce nuclease activity include but are not limited to N580A, N584A, T587A, W609A, D610A, K613A, E614A, D616A, K624A, D625A, K627A and Y629A. In a preferred embodiment, the mutation in the FnCpf1p RuvC domain is D917A or E1006A, wherein the D917A or E1006A mutation completely inactivates the DNA cleavage activity of the FnCpf1 effector protein. In another embodiment, the mutation in the FnCpf1p RuvC domain is D1255A, wherein the mutated FnCpf1 effector protein has significantly reduced nucleolytic activity.

[0369] More particularly, the inactivated Cpf1 enzymes include enzymes mutated in amino acid positions As908, As993, As1263 of AsCpf1 or corresponding positions in Cpf1 orthologs. Additionally, the inactivated Cpf1 enzymes include enzymes mutated in amino acid position Lb832, 925, 947 or 1180 of LbCpf1 or corresponding positions in Cpf1 orthologs. More particularly, the inactivated Cpf1 enzymes include enzymes comprising one or more of mutations AsD908A, AsE993A, AsD1263A of AsCpf1 or corresponding mutations in Cpf1 orthologs. Additionally, the inactivated Cpf1 enzymes include enzymes comprising one or more of mutations LbD832A, E925A, D947A or D1180A of LbCpf1 or corresponding mutations in Cpf1 orthologs.

[0370] Mutations can also be made at neighboring residues, e.g., at amino acids near those indicated above that participate in the nuclease activity. In some embodiments, only the RuvC domain is inactivated, and in other embodiments, another putative nuclease domain is inactivated, wherein the effector protein complex functions as a nickase and cleaves only one DNA strand. In a preferred embodiment, the other putative nuclease domain is a HincII-like endonuclease domain. In some embodiments, two FnCpf1, AsCpf1 or LbCpf1 variants (each a different nickase) are used to increase specificity, two nickase variants are used to cleave DNA at a target (where both nickases cleave a DNA strand, while minimizing or eliminating off-target modifications where only one DNA strand is cleaved and subsequently repaired). In preferred embodiments the Cpf1 effector protein cleaves sequences associated with or at a target locus of interest as a homodimer comprising two Cpf1 effector protein molecules. In a preferred embodiment the homodimer may comprise two Cpf1 effector protein molecules comprising a different mutation in their respective RuvC domains.

[0371] The inactivated Cpf1 CRISPR enzyme may have associated (e.g., via fusion protein) one or more functional domains, including for example, one or more domains from the group comprising, consisting essentially of, or consisting of methylase activity, demethylase activity, transcription activation activity, transcription repression activity, transcription release factor activity, histone modification activity, RNA cleavage activity, DNA cleavage activity, nucleic acid binding activity, and molecular switches (e.g., light inducible). Preferred domains are Fok1, VP64, P65, HSF1, MyoD1. In the event that Fok1 is provided, it is advantageous that multiple Fok1 functional domains are provided to allow for a functional dimer and that gRNAs are designed to provide proper spacing for functional use (Fok1) as specifically described in Tsai et al. Nature Biotechnology, Vol. 32, Number 6, June 2014). The adaptor protein may utilize known linkers to attach such functional domains. In some cases it is advantageous that additionally at least one NLS is provided. In some instances, it is advantageous to position the NLS at the N terminus. When more than one functional domain is included, the functional domains may be the same or different.

[0372] In general, the positioning of the one or more functional domain on the inactivated Cpf1 enzyme is one which allows for correct spatial orientation for the functional domain to affect the target with the attributed functional effect. For example, if the functional domain is a transcription activator (e.g., VP64 or p65), the transcription activator is placed in a spatial orientation which allows it to affect the transcription of the target. Likewise, a transcription repressor will be advantageously positioned to affect the transcription of the target, and a nuclease (e.g., Fok1) will be advantageously positioned to cleave or partially cleave the target. This may include positions other than the N-/C-terminus of the CRISPR enzyme.

### Cas13 Truncations

[0373] In certain embodiments, the effector protein (CRISPR enzyme; Cas13; effector protein) according to the invention as described herein is a catalytically inactive or dead Cas13 effector protein (dCas13). In some embodiments, the dCas13 effector comprises mutations in the nuclease domain. In some embodiments, the dCas13 effector protein has been truncated.

[0374] To reduce the size of a fusion protein of the Cas13 effector and the one or more functional domains, the C-terminus of the Cas13 effector can be truncated while still maintaining its RNA binding function. For example, at least 20 amino acids, at least 40 amino acids, at least 50 amino acids, at least 60 amino acids, at least 80 amino acids, at least 100 amino acids, at least 120 amino acids, at least 140 amino acids, at least 150 amino acids, at least 160 amino acids, at least 180 amino acids, at least 200 amino acids, at least 220 amino acids, at least 240 amino acids, at least 250 amino acids, at least 260 amino acids, or at least 300 amino acids, or at least 350 amino acids, or up to 120 amino acids, or up to 140 amino acids, or up to 160 amino acids, or up to 180 amino acids, or up to 200 amino acids, or up to 250 amino acids, or up to 300 amino acids, or up to 350 amino acids, or up to 400 amino acids, may be truncated at the C-terminus of the Cas13 effector. Specific examples of Cas13 truncations include C-terminal Δ984-1090, C-terminal Δ1026-1090, and C-terminal Δ1053-1090, C-terminal Δ934-1090, C-terminal Δ884-1090, C-terminal Δ834-1090, C-terminal Δ784-1090, and C-terminal Δ734-1090, wherein amino acid positions correspond to amino acid positions of Prevotella sp. P5-125 Cas13b protein. The skilled person will understand that similar truncations can be designed for other Cas13b orthologues, or other Cas13 types or subtypes, such as Cas13a, Cas13c, or Cas13d. In some cases, the truncated Cas13b is encoded by nt 1-984 of Prevotella sp. P5-125 Cas13b or the corresponding nt of a Cas13b orthologue or homologue. Examples of Cas13 truncations also include C-terminal Δ795-1095, wherein amino acid positions correspond to amino acid positions of Riemerella anatipestifer Cas13b protein. Examples of Cas13 truncations further include C-terminal Δ 875-1175, C-terminal Δ 895-1175, C-terminal Δ 915-1175, C-terminal Δ 935-1175, C-terminal Δ 955-1175, C-terminal Δ 975-1175, C-terminal Δ 995-1175, C-terminal Δ 1015-1175, C-terminal Δ 1035-1175, C-terminal Δ 1055-1175, C-terminal Δ 1075-1175, C-terminal Δ 1095-1175, C-terminal Δ 1115-1175, C-terminal Δ 1135-1175, C-terminal Δ 1155-1175, wherein amino acid positions correspond to amino acid positions of Porphyromonas gulae Cas13b protein.

[0375] In some embodiments, the N-terminus of the Cas13 effector protein may be truncated. For example, at least 20 amino acids, at least 40 amino acids, at least 50 amino acids, at least 60 amino acids, at least 80 amino acids, at least 100 amino acids, at least 120 amino acids, at least 140 amino acids, at least 150 amino acids, at least 160 amino acids, at least 180 amino acids, at least 200 amino acids, at least 220 amino acids, at least 240 amino acids, at least 250 amino acids, at least 260 amino acids, or at least 300 amino acids, or at least 350 amino acids, or up to 120 amino acids, or up to 140 amino acids, or up to 160 amino acids, or up to 180 amino acids, or up to 200 amino acids, or up to 250 amino acids, or up to 300 amino acids, or up to 350 amino acids, or up to 400 amino acids, may be truncated at the N-terminus of the Cas13 effector. Examples of Cas13 truncations include N-terminal Δ1-125, N-terminal Δ 1-88, or N-terminal Δ 1-72, wherein amino acid positions of the truncations correspond to amino acid positions of Prevotella sp. P5-125 Cas13b protein.

[0376] In some embodiments, both the N- and the C-termini of the Cas13 effector protein may be truncated. For example, at least 20 amino acids may be truncated at the C-terminus of the Cas13 effector, and at least 20 amino acids, at least 40 amino acids, at least 60 amino acids, at least 80 amino acids, at least 100 amino acids, at least 120 amino acids, at least 140 amino acids, at least 160 amino acids, at least 180 amino acids, at least 200 amino acids, at least 220 amino acids, at least 240 amino acids, at least 260 amino acids, at least 300 amino acids, or at least 350 amino acids may be truncated at the N-terminus of the Cas13 effector. For example, at least 40 amino acids may be truncated at the C-terminus of the Cas13 effector, and at least 20 amino acids, at least 40 amino acids, at least 60 amino acids, at least 80 amino acids, at least 100 amino acids, at least 120 amino acids, at least 140 amino acids, at least 160 amino acids, at least 180 amino acids, at least 200 amino acids, at least 220 amino acids, at least 240 amino acids, at least 260 amino acids, at least 300 amino acids, or at least 350 amino acids may be truncated at the N-terminus of the Cas13 effector. For example, at least 60 amino acids may be truncated at the C-terminus of the Cas13 effector, and at least 20 amino acids, at least 40 amino acids, at least 60 amino acids, at least 80 amino acids, at least 100 amino acids, at least 120 amino acids, at least 140 amino acids, at least 160 amino acids, at least 180 amino acids, at least 200 amino acids, at least 220 amino acids, at least 240 amino acids, at least 260 amino acids, at least 300 amino acids, or at least 350 amino acids may be truncated at the N-terminus of the Cas13 effector. For example, at least 80 amino acids may be truncated at the C-terminus of the Cas13 effector, and at least 20 amino acids, at least 40 amino acids, at least 60 amino acids, at least 80 amino acids, at least 100 amino acids, at least 120 amino acids, at least 140 amino acids, at least 160 amino acids, at least 180 amino acids, at least 200 amino acids, at least 220 amino acids, at least 240 amino acids, at least 260 amino acids, at least 300 amino acids, or at least 350 amino acids may be truncated at the N-terminus of the Cas13 effector. For example, at least 100 amino acids may be truncated at the C-terminus of the Cas13 effector, and at least 20 amino acids, at least 40 amino acids, at least 60 amino acids, at least 80 amino acids, at least 100 amino acids, at least 120 amino acids, at least 140 amino acids, at least 160 amino acids, at least 180 amino acids, at least 200 amino acids, at least 220 amino acids, at least 240 amino acids, at least 260 amino acids, at least 300 amino acids, or at least 350 amino acids may be truncated at the N-terminus of the Cas13 effector. For example, at least 120 amino acids may be truncated at the C-terminus of the Cas13 effector, and at least 20 amino acids, at least 40 amino acids, at least 60 amino acids, at least 80 amino acids, at least 100 amino acids, at least 120 amino acids, at least 140 amino acids, at least 160 amino acids, at least 180 amino acids, at least 200 amino acids, at least 220 amino acids, at least 240 amino acids, at least 260 amino acids, at least 300 amino acids, or at least 350 amino acids may be truncated at the N-terminus of the Cas13 effector. For example, at least 140 amino acids may be truncated at the C-terminus of the Cas13 effector, and at least 20 amino acids, at least 40 amino acids, at least 60 amino acids, at least 80 amino acids, at least 100 amino acids, at least 120 amino acids, at least 140 amino acids, at least 160 amino acids, at least 180 amino acids, at least 200 amino acids, at least 220 amino acids, at least 240 amino acids, at least 260 amino acids, at least 300 amino acids, or at least 350 amino acids may be truncated at the N-terminus of the Cas13 effector. For example, at least 160 amino acids may be truncated at the C-terminus of the Cas13 effector, and at least 20 amino acids, at least 40 amino acids, at least 60 amino acids, at least 80 amino acids, at least 100 amino acids, at least 120 amino acids, at least 140 amino acids, at least 160 amino acids, at least 180 amino acids, at least 200 amino acids, at least 220 amino acids, at least 240 amino acids, at least 260 amino acids, at least 300 amino acids, or at least 350 amino acids may be truncated at the N-terminus of the Cas13 effector. For example, at least 180 amino acids may be truncated at the C-terminus of the Cas13 effector, and at least 20 amino acids, at least 40 amino acids, at least 60 amino acids, at least 80 amino acids, at least 100 amino acids, at least 120 amino acids, at least 140 amino acids, at least 160 amino acids, at least 180 amino acids, at least 200 amino acids, at least 220 amino acids, at least 240 amino acids, at least 260 amino acids, at least 300 amino acids, or at least 350 amino acids may be truncated at the N-terminus of the Cas13 effector. For example, at least 200 amino acids may be truncated at the C-terminus of the Cas13 effector, and at least 20 amino acids, at least 40 amino acids, at least 60 amino acids, at least 80 amino acids, at least 100 amino acids, at least 120 amino acids, at least 140 amino acids, at least 160 amino acids, at least 180 amino acids, at least 200 amino acids, at least 220 amino acids, at least 240 amino acids, at least 260 amino acids, at least 300 amino acids, or at least 350 amino acids may be truncated at the N-terminus of the Cas13 effector. For example, at least 220 amino acids may be truncated at the C-terminus of the Cas13 effector, and at least 20 amino acids, at least 40 amino acids, at least 60 amino acids, at least 80 amino acids, at least 100 amino acids, at least 120 amino acids, at least 140 amino acids, at least 160 amino acids, at least 180 amino acids, at least 200 amino acids, at least 220 amino acids, at least 240 amino acids, at least 260 amino acids, at least 300 amino acids, or at least 350 amino acids may be truncated at the N-terminus of the Cas13 effector. For example, at least 240 amino acids may be truncated at the C-terminus of the Cas13 effector, and at least 20 amino acids, at least 40 amino acids, at least 60 amino acids, at least 80 amino acids, at least 100 amino acids, at least 120 amino acids, at least 140 amino acids, at least 160 amino acids, at least 180 amino acids, at least 200 amino acids, at least 220 amino acids, at least 240 amino acids, at least 260 amino acids, at least 300 amino acids, or at least 350 amino acids may be truncated at the N-terminus of the Cas13 effector. For example, at least 260 amino acids may be truncated at the C-terminus of the Cas13 effector, and at least 20 amino acids, at least 40 amino acids, at least 60 amino acids, at least 80 amino acids, at least 100 amino acids, at least 120 amino acids, at least 140 amino acids, at least 160 amino acids, at least 180 amino acids, at least 200 amino acids, at least 220 amino acids, at least 240 amino acids, at least 260 amino acids, at least 300 amino acids, or at least 350 amino acids may be truncated at the N-terminus of the Cas13 effector. For example, at least 280 amino acids may be truncated at the C-terminus of the Cas13 effector, and at least 20 amino acids, at least 40 amino acids, at least 60 amino acids, at least 80 amino acids, at least 100 amino acids, at least 120 amino acids, at least 140 amino acids, at least 160 amino acids, at least 180 amino acids, at least 200 amino acids, at least 220 amino acids, at least 240 amino acids, at least 260 amino acids, at least 300 amino acids, or at least 350 amino acids may be truncated at the N-terminus of the Cas13 effector. For example, at least 300 amino acids may be truncated at the C-terminus of the Cas13 effector, and at least 20 amino acids, at least 40 amino acids, at least 60 amino acids, at least 80 amino acids, at least 100 amino acids, at least 120 amino acids, at least 140 amino acids, at least 160 amino acids, at least 180 amino acids, at least 200 amino acids, at least 220 amino acids, at least 240 amino acids, at least 260 amino acids, at least 300 amino acids, or at least 350 amino acids may be truncated at the N-terminus of the Cas13 effector. For example, at least 350 amino acids may be truncated at the C-terminus of the Cas13 effector, and at least 20 amino acids, at least 40 amino acids, at least 60 amino acids, at least 80 amino acids, at least 100 amino acids, at least 120 amino acids, at least 140 amino acids, at least 160 amino acids, at least 180 amino acids, at least 200 amino acids, at least 220 amino acids, at least 240 amino acids, at least 260 amino acids, at least 300 amino acids, or at least 350 amino acids may be truncated at the N-terminus of the Cas13 effector. For example, at least 20 amino acids may be truncated at the N-terminus of the Cas13 effector, and at least 20 amino acids, at least 40 amino acids, at least 60 amino acids, at least 80 amino acids, at least 100 amino acids, at least 120 amino acids, at least 140 amino acids, at least 160 amino acids, at least 180 amino acids, at least 200 amino acids, at least 220 amino acids, at least 240 amino acids, at least 260 amino acids, at least 300 amino acids, or at least 350 amino acids may be truncated at the C-terminus of the Cas13 effector. For example, at least 40 amino acids may be truncated at the N-terminus of the Cas13 effector, and at least 20 amino acids, at least 40 amino acids, at least 60 amino acids, at least 80 amino acids, at least 100 amino acids, at least 120 amino acids, at least 140 amino acids, at least 160 amino acids, at least 180 amino acids, at least 200 amino acids, at least 220 amino acids, at least 240 amino acids, at least 260 amino acids, at least 300 amino acids, or at least 350 amino acids may be truncated at the C-terminus of the Cas13 effector. For example, at least 60 amino acids may be truncated at the N-terminus of the Cas13 effector, and at least 20 amino acids, at least 40 amino acids, at least 60 amino acids, at least 80 amino acids, at least 100 amino acids, at least 120 amino acids, at least 140 amino acids, at least 160 amino acids, at least 180 amino acids, at least 200 amino acids, at least 220 amino acids, at least 240 amino acids, at least 260 amino acids, at least 300 amino acids, or at least 350 amino acids may be truncated at the C-terminus of the Cas13 effector. For example, at least 80 amino acids may be truncated at the N-terminus of the Cas13 effector, and at least 20 amino acids, at least 40 amino acids, at least 60 amino acids, at least 80 amino acids, at least 100 amino acids, at least 120 amino acids, at least 140 amino acids, at least 160 amino acids, at least 180 amino acids, at least 200 amino acids, at least 220 amino acids, at least 240 amino acids, at least 260 amino acids, at least 300 amino acids, or at least 350 amino acids may be truncated at the C-terminus of the Cas13 effector. For example, at least 100 amino acids may be truncated at the N-terminus of the Cas13 effector, and at least 20 amino acids, at least 40 amino acids, at least 60 amino acids, at least 80 amino acids, at least 100 amino acids, at least 120 amino acids, at least 140 amino acids, at least 160 amino acids, at least 180 amino acids, at least 200 amino acids, at least 220 amino acids, at least 240 amino acids, at least 260 amino acids, at least 300 amino acids, or at least 350 amino acids may be truncated at the C-terminus of the Cas13 effector. For example, at least 120 amino acids may be truncated at the N-terminus of the Cas13 effector, and at least 20 amino acids, at least 40 amino acids, at least 60 amino acids, at least 80 amino acids, at least 100 amino acids, at least 120 amino acids, at least 140 amino acids, at least 160 amino acids, at least 180 amino acids, at least 200 amino acids, at least 220 amino acids, at least 240 amino acids, at least 260 amino acids, at least 300 amino acids, or at least 350 amino acids may be truncated at the C-terminus of the Cas13 effector. For example, at least 140 amino acids may be truncated at the N-terminus of the Cas13 effector, and at least 20 amino acids, at least 40 amino acids, at least 60 amino acids, at least 80 amino acids, at least 100 amino acids, at least 120 amino acids, at least 140 amino acids, at least 160 amino acids, at least 180 amino acids, at least 200 amino acids, at least 220 amino acids, at least 240 amino acids, at least 260 amino acids, at least 300 amino acids, or at least 350 amino acids may be truncated at the C-terminus of the Cas13 effector. For example, at least 160 amino acids may be truncated at the N-terminus of the Cas13 effector, and at least 20 amino acids, at least 40 amino acids, at least 60 amino acids, at least 80 amino acids, at least 100 amino acids, at least 120 amino acids, at least 140 amino acids, at least 160 amino acids, at least 180 amino acids, at least 200 amino acids, at least 220 amino acids, at least 240 amino acids, at least 260 amino acids, at least 300 amino acids, or at least 350 amino acids may be truncated at the C-terminus of the Cas13 effector. For example, at least 180 amino acids may be truncated at the N-terminus of the Cas13 effector, and at least 20 amino acids, at least 40 amino acids, at least 60 amino acids, at least 80 amino acids, at least 100 amino acids, at least 120 amino acids, at least 140 amino acids, at least 160 amino acids, at least 180 amino acids, at least 200 amino acids, at least 220 amino acids, at least 240 amino acids, at least 260 amino acids, at least 300 amino acids, or at least 350 amino acids may be truncated at the C-terminus of the Cas13 effector. For example, at least 200 amino acids may be truncated at the N-terminus of the Cas13 effector, and at least 20 amino acids, at least 40 amino acids, at least 60 amino acids, at least 80 amino acids, at least 100 amino acids, at least 120 amino acids, at least 140 amino acids, at least 160 amino acids, at least 180 amino acids, at least 200 amino acids, at least 220 amino acids, at least 240 amino acids, at least 260 amino acids, at least 300 amino acids, or at least 350 amino acids may be truncated at the C-terminus of the Cas13 effector. For example, at least 220 amino acids may be truncated at the N-terminus of the Cas13 effector, and at least 20 amino acids, at least 40 amino acids, at least 60 amino acids, at least 80 amino acids, at least 100 amino acids, at least 120 amino acids, at least 140 amino acids, at least 160 amino acids, at least 180 amino acids, at least 200 amino acids, at least 220 amino acids, at least 240 amino acids, at least 260 amino acids, at least 300 amino acids, or at least 350 amino acids may be truncated at the C-terminus of the Cas13 effector. For example, at least 240 amino acids may be truncated at the N-terminus of the Cas13 effector, and at least 20 amino acids, at least 40 amino acids, at least 60 amino acids, at least 80 amino acids, at least 100 amino acids, at least 120 amino acids, at least 140 amino acids, at least 160 amino acids, at least 180 amino acids, at least 200 amino acids, at least 220 amino acids, at least 240 amino acids, at least 260 amino acids, at least 300 amino acids, or at least 350 amino acids may be truncated at the C-terminus of the Cas13 effector. For example, at least 260 amino acids may be truncated at the N-terminus of the Cas13 effector, and at least 20 amino acids, at least 40 amino acids, at least 60 amino acids, at least 80 amino acids, at least 100 amino acids, at least 120 amino acids, at least 140 amino acids, at least 160 amino acids, at least 180 amino acids, at least 200 amino acids, at least 220 amino acids, at least 240 amino acids, at least 260 amino acids, at least 300 amino acids, or at least 350 amino acids may be truncated at the C-terminus of the Cas13 effector. For example, at least 280 amino acids may be truncated at the N-terminus of the Cas13 effector, and at least 20 amino acids, at least 40 amino acids, at least 60 amino acids, at least 80 amino acids, at least 100 amino acids, at least 120 amino acids, at least 140 amino acids, at least 160 amino acids, at least 180 amino acids, at least 200 amino acids, at least 220 amino acids, at least 240 amino acids, at least 260 amino acids, at least 300 amino acids, or at least 350 amino acids may be truncated at the C-terminus of the Cas13 effector. For example, at least 300 amino acids may be truncated at the N-terminus of the Cas13 effector, and at least 20 amino acids, at least 40 amino acids, at least 60 amino acids, at least 80 amino acids, at least 100 amino acids, at least 120 amino acids, at least 140 amino acids, at least 160 amino acids, at least 180 amino acids, at least 200 amino acids, at least 220 amino acids, at least 240 amino acids, at least 260 amino acids, at least 300 amino acids, or at least 350 amino acids may be truncated at the C-terminus of the Cas13 effector. For example, at least 350 amino acids may be truncated at the N-terminus of the Cas13 effector, and at least 20 amino acids, at least 40 amino acids, at least 60 amino acids, at least 80 amino acids, at least 100 amino acids, at least 120 amino acids, at least 140 amino acids, at least 160 amino acids, at least 180 amino acids, at least 200 amino acids, at least 220 amino acids, at least 240 amino acids, at least 260 amino acids, at least 300 amino acids, or at least 350 amino acids may be truncated at the C-terminus of the Cas13 effector.

### Optimization of CRISPR-Cas Systems

[0377] In another aspect, the present invention relates to methods for developing or designing CRISPR-Cas systems. In an aspect, the present invention relates to methods for developing or designing CRISPR-Cas system based therapy or therapeutics. The present invention in particular relates to methods for improving CRISPR-Cas systems, such as CRISPR-Cas system based therapy or therapeutics. Key characteristics of successful CRISPR-Cas systems, such as CRISPR-Cas system based therapy or therapeutics involve high specificity, high efficacy, and high safety. High specificity and high safety can be achieved among others by reduction of off-target effects.

[0378] Accordingly, in another aspect, the invention relates to a method as described herein, comprising selection of one or more (therapeutic) target, selecting one or more CRISPR-Cas system functionality, and optimization of selected parameters or variables associated with the CRISPR-Cas system and/or its functionality. In a related aspect, the invention relates to a method as described herein, comprising (a) selecting one or more (therapeutic) target loci, (b) selecting one or more CRISPR-Cas system functionalities, (c) optionally selecting one or more modes of delivery, and preparing, developing, or designing a CRISPR-Cas system selected based on steps (a)-(c).

[0379] In certain embodiments, CRISPR-Cas system functionality comprises genomic mutation. In certain embodiments, CRISPR-Cas system functionality comprises single genomic mutation. In certain embodiments, CRISPR-Cas system functionality comprises multiple genomic mutation. In certain embodiments, CRISPR-Cas system functionality comprises gene knockout. In certain embodiments, CRISPR-Cas system functionality comprises single gene knockout. In certain embodiments, CRISPR-Cas system functionality comprises multiple gene knockout. In certain embodiments, CRISPR-Cas system functionality comprises gene correction. In certain embodiments, CRISPR-Cas system functionality comprises single gene correction. In certain embodiments, CRISPR-Cas system functionality comprises multiple gene correction. In certain embodiments, CRISPR-Cas system functionality comprises genomic region correction. In certain embodiments, CRISPR-Cas system functionality comprises single genomic region correction. In certain embodiments, CRISPR-Cas system functionality comprises multiple genomic region correction. In certain embodiments, CRISPR-Cas system functionality comprises gene deletion. In certain embodiments, CRISPR-Cas system functionality comprises single gene deletion. In certain embodiments, CRISPR-Cas system functionality comprises multiple gene deletion. In certain embodiments, CRISPR-Cas system functionality comprises genomic region deletion. In certain embodiments, CRISPR-Cas system functionality comprises single genomic region deletion. In certain embodiments, CRISPR-Cas system functionality comprises multiple genomic region deletion. In certain embodiments, CRISPR-Cas system functionality comprises modulation of gene or genomic region functionality. In certain embodiments, CRISPR-Cas system functionality comprises modulation of single gene or genomic region functionality. In certain embodiments, CRISPR-Cas system functionality comprises modulation of multiple gene or genomic region functionality. In certain embodiments, CRISPR-Cas system functionality comprises gene or genomic region functionality, such as gene or genomic region activity. In certain embodiments, CRISPR-Cas system functionality comprises single gene or genomic region functionality, such as gene or genomic region activity. In certain embodiments, CRISPR-Cas system functionality comprises multiple gene or genomic region functionality, such as gene or genomic region activity. In certain embodiments, CRISPR-Cas system functionality comprises modulation gene activity or accessibility optionally leading to transcriptional and/or epigenetic gene or genomic region activation or gene or genomic region silencing. In certain embodiments, CRISPR-Cas system functionality comprises modulation single gene activity or accessibility optionally leading to transcriptional and/or epigenetic gene or genomic region activation or gene or genomic region silencing. In certain embodiments, CRISPR-Cas system functionality comprises modulation multiple gene activity or accessibility optionally leading to transcriptional and/or epigenetic gene or genomic region activation or gene or genomic region silencing.

[0380] The methods as described herein may further involve selection of the CRISPR-Cas system mode of delivery. In certain embodiments, gRNA (and tracr, if and where needed, optionally provided as a sgRNA) and/or CRISPR effector protein are or are to be delivered. In certain embodiments, gRNA (and tracr, if and where needed, optionally provided as a sgRNA) and/or CRISPR effector mRNA are or are to be delivered. In certain embodiments, gRNA (and tracr, if and where needed, optionally provided as a sgRNA) and/or CRISPR effector provided in a DNA-based expression system are or are to be delivered. In certain embodiments, delivery of the individual CRISPR-Cas system components comprises a combination of the above modes of delivery. In certain embodiments, delivery comprises delivering gRNA and/or CRISPR effector protein, delivering gRNA and/or CRISPR effector mRNA, or delivering gRNA and/or CRISPR effector as a DNA based expression system.

[0381] Accordingly, in an aspect, the invention relates to a method as described herein, comprising selection of one or more (therapeutic) target, selecting CRISPR-Cas system functionality, selecting CRISPR-Cas system mode of delivery, and optimization of selected parameters or variables associated with the CRISPR-Cas system and/or its functionality.

[0382] The methods as described herein may further involve selection of the CRISPR-Cas system delivery vehicle and/or expression system. Delivery vehicles and expression systems are described herein elsewhere. By means of example, delivery vehicles of nucleic acids and/or proteins include nanoparticles, liposomes, etc. Delivery vehicles for DNA, such as DNA-based expression systems include for instance biolistics, viral based vector systems (e.g. adenoviral, AAV, lentiviral), etc. the skilled person will understand that selection of the mode of delivery, as well as delivery vehicle or expression system may depend on for instance the cell or tissues to be targeted. In certain embodiments, the a delivery vehicle and/or expression system for delivering the CRISPR-Cas systems or components thereof comprises liposomes, lipid particles, nanoparticles, biolistics, or viral-based expression/delivery systems.

[0383] Accordingly, in an aspect, the invention relates to a method as described herein, comprising selection of one or more (therapeutic) target, selecting CRISPR-Cas system functionality, selecting CRISPR-Cas system mode of delivery, selecting CRISPR-Cas system delivery vehicle or expression system, and optimization of selected parameters or variables associated with the CRISPR-Cas system and/or its functionality.

[0384] Optimization of selected parameters or variables in the methods as described herein may result in optimized or improved CRISPR-Cas system, such as CRISPR-Cas system based therapy or therapeutic, specificity, efficacy, and/or safety. In certain embodiments, one or more of the following parameters or variables are taken into account, are selected, or are optimized in the methods of the invention as described herein: CRISPR effector specificity, gRNA specificity, CRISPR-Cas complex specificity, PAM restrictiveness, PAM type (natural or modified), PAM nucleotide content, PAM length, CRISPR effector activity, gRNA activity, CRISPR-Cas complex activity, target cleavage efficiency, target site selection, target sequence length, ability of effector protein to access regions of high chromatin accessibility, degree of uniform enzyme activity across genomic targets, epigenetic tolerance, mismatch/budge tolerance, CRISPR effector stability, CRISPR effector mRNA stability, gRNA stability, CRISPR-Cas complex stability, CRISPR effector protein or mRNA immunogenicity or toxicity, gRNA immunogenicity or toxicity, CRISPR-Cas complex immunogenicity or toxicity, CRISPR effector protein or mRNA dose or titer, gRNA dose or titer, CRISPR-Cas complex dose or titer, CRISPR effector protein size, CRISPR effector expression level, gRNA expression level, CRISPR-Cas complex expression level, CRISPR effector spatiotemporal expression, gRNA spatiotemporal expression, CRISPR-Cas complex spatiotemporal expression.

[0385] In certain embodiments, selecting one or more CRISP-Cas system functionalities comprises selecting one or more of an optimal effector protein, an optimal guide RNA, or both.

[0386] In certain embodiments, selecting an optimal effector protein comprises optimizing one or more of effector protein type, size, PAM specificity, effector protein stability, immunogenicity or toxicity, functional specificity, and efficacy, or other CRISPR effector associated parameters or variables as described herein elsewhere.

[0387] In certain embodiments, the effector protein is a naturally occurring or modified effector protein.

[0388] In certain embodiments, the modified effector protein is a nickase, a deaminase, or a deactivated effector protein.

[0389] In certain embodiments, optimizing size comprises selecting a protein effector having a minimal size.

[0390] In certain embodiments, optimizing a PAM specificity comprises selecting an effector protein having a modified PAM specificity.

[0391] In certain embodiments, optimizing effector protein stability comprises selecting an effector protein having a short half-life while maintaining sufficient activity, such as by selecting an appropriate CRISPR effector orthologue having a specific half-life or stability.

[0392] In certain embodiments, optimizing immunogenicity or toxicity comprises minimizing effector protein immunogenicity or toxicity by protein modifications.

[0393] In certain embodiments, optimizing functional specific comprises selecting a protein effector with reduced tolerance of mismatches and/or bulges between the guide RNA and one or more target loci.

[0394] In certain embodiments, optimizing efficacy comprises optimizing overall efficiency, epigenetic tolerance, or both.

[0395] In certain embodiments, maximizing overall efficiency comprises selecting an effector protein with uniform enzyme activity across target loci with varying chromatin complexity, selecting an effector protein with enzyme activity limited to areas of open chromatin accessibility.

[0396] In certain embodiments, chromatin accessibility is measured using one or more of ATAC-seq, or a DNA-proximity ligation assay.

[0397] In certain embodiments, optimizing epigenetic tolerance comprises optimizing methylation tolerance, epigenetic mark competition, or both.

[0398] In certain embodiments, optimizing methylation tolerance comprises selecting an effector protein that modify methylated DNA.

[0399] In certain embodiments, optimizing epigenetic tolerance comprises selecting an effector protein unable to modify silenced regions of a chromosome, selecting an effector protein able to modify silenced regions of a chromosome, or selecting target loci not enriched for epigenetic markers

[0400] In certain embodiments, selecting an optimized guide RNA comprises optimizing gRNA stability, gRNA immunogenicity, or both, or other gRNA associated parameters or variables as described herein elsewhere.

[0401] In certain embodiments, optimizing gRNA stability and/or gRNA immunogenicity comprises RNA modification, or other gRNA associated parameters or variables as described herein elsewhere. In certain embodiments, the modification comprises removing 1-3 nucleotides form the 3′ end of a target complementarity region of the gRNA. In certain embodiments, modification comprises an extended gRNA and/or trans RNA/DNA element that create stable structures in the gRNA that compete with gRNA base pairing at a target of off-target loci, or extended complimentary nucleotides between the gRNA and target sequence, or both.

[0402] In certain embodiments, the mode of delivery comprises delivering gRNA and/or CRISPR effector protein, delivering gRNA and/or CRISPR effector mRNA, or delivery gRNA and/or CRISPR effector as a DNA based expression system. In certain embodiments, the mode of delivery further comprises selecting a delivery vehicle and/or expression systems from the group consisting of liposomes, lipid particles, nanoparticles, biolistics, or viral-based expression/delivery systems. In certain embodiments, expression is spatiotemporal expression is optimized by choice of conditional and/or inducible expression systems, including controllable CRISPR effector activity optionally a destabilized CRISPR effector and/or a split CRISPR effector, and/or cell- or tissue-specific expression system.

[0403] The above described parameters or variables, as well as means for optimization are described herein elsewhere. By means of example, and without limitation, parameter or variable optimization may be achieved as follows. CRISPR effector specificity may be optimized by selecting the most specific CRISPR effector. This may be achieved for instance by selecting the most specific CRISPR effector orthologue or by specific CRISPR effector mutations which increase specificity. gRNA specificity may be optimized by selecting the most specific gRNA. This may be achieved for instance by selecting gRNA having low homology, i.e. at least one or preferably more, such as at least 2, or preferably at least 3, mismatches to off-target sites. CRISPR-Cas complex specificity may be optimized by increasing CRISPR effector specificity and/or gRNA specificity as above. PAM restrictiveness may be optimized by selecting a CRISPR effector having to most restrictive PAM recognition. This may be achieved for instance by selecting a CRISPR effector orthologue having more restrictive PAM recognition or by specific CRISPR effector mutations which increase or alter PAM restrictiveness. PAM type may be optimized for instance by selecting the appropriate CRISPR effector, such as the appropriate CRISPR effector recognizing a desired PAM type. The CRISPR effector or PAM type may be naturally occurring or may for instance be optimized based on CRISPR effector mutants having an altered PAM recognition, or PAM recognition repertoire. PAM nucleotide content may for instance be optimized by selecting the appropriate CRISPR effector, such as the appropriate CRISPR effector recognizing a desired PAM nucleotide content. The CRISPR effector or PAM type may be naturally occurring or may for instance be optimized based on CRISPR effector mutants having an altered PAM recognition, or PAM recognition repertoire. PAM length may for instance be optimized by selecting the appropriate CRISPR effector, such as the appropriate CRISPR effector recognizing a desired PAM nucleotide length. The CRISPR effector or PAM type may be naturally occurring or may for instance be optimized based on CRISPR effector mutants having an altered PAM recognition, or PAM recognition repertoire. Target length or target sequence length may for instance be optimized by selecting the appropriate CRISPR effector, such as the appropriate CRISPR effector recognizing a desired target or target sequence nucleotide length. Alternatively, or in addition, the target (sequence) length may be optimized by providing a target having a length deviating from the target (sequence) length typically associated with the CRISPR effector, such as the naturally occurring CRISPR effector. The CRISPR effector or target (sequence) length may be naturally occurring or may for instance be optimized based on CRISPR effector mutants having an altered target (sequence) length recognition, or target (sequence) length recognition repertoire. For instance, increasing or decreasing target (sequence) length may influence target recognition and/or off-target recognition. CRISPR effector activity may be optimized by selecting the most active CRISPR effector. This may be achieved for instance by selecting the most active CRISPR effector orthologue or by specific CRISPR effector mutations which increase activity. The ability of the CRISPR effector protein to access regions of high chromatin accessibility, may be optimized by selecting the appropriate CRISPR effector or mutant thereof, and may take into account the size of the CRISPR effector, charge, or other dimensional variables etc. The degree of uniform CRISPR effector activity may be optimized by selecting the appropriate CRISPR effector or mutant thereof, and may take into account CRISPR effector specificity and/or activity, PAM specificity, target length, mismatch tolerance, epigenetic tolerance, CRISPR effector and/or gRNA stability and/or half-life, CRISPR effector and/or gRNA immunogenicity and/or toxicity, etc. gRNA activity may be optimized by selecting the most active gRNA. This may be achieved for instance by increasing gRNA stability through RNA modification. CRISPR-Cas complex activity may be optimized by increasing CRISPR effector activity and/or gRNA activity as above. The target site selection may be optimized by selecting the optimal position of the target site within a gene, locus or other genomic region. The target site selection may be optimized by optimizing target location comprises selecting a target sequence with a gene, locus, or other genomic region having low variability. This may be achieved for instance by selecting a target site in an early and/or conserved exon or domain (i.e. having low variability, such as polymorphisms, within a population). Alternatively, the target site may be selected by minimization of off-target effects (e.g. off-targets qualified as having 1-5, 1-4, or preferably 1-3 mismatches compared to target and/or having one or more PAM mismatches, such as distal PAM mismatches), preferably also taking into account variability within a population. CRISPR effector stability may be optimized by selecting CRISPR effector having appropriate half-life, such as preferably a short half-life while still capable of maintaining sufficient activity. This may be achieved for instance by selecting an appropriate CRISPR effector orthologue having a specific half-life or by specific CRISPR effector mutations or modifications which affect half-life or stability, such as inclusion (e.g. fusion) of stabilizing or destabilizing domains or sequences. CRISPR effector mRNA stability may be optimized by increasing or decreasing CRISPR effector mRNA stability. This may be achieved for instance by increasing or decreasing CRISPR effector mRNA stability through mRNA modification. gRNA stability may be optimized by increasing or decreasing gRNA stability. This may be achieved for instance by increasing or decreasing gRNA stability through RNA modification. CRISPR-Cas complex stability may be optimized by increasing or decreasing CRISPR effector stability and/or gRNA stability as above. CRISPR effector protein or mRNA immunogenicity or toxicity may be optimized by decreasing CRISPR effector protein or mRNA immunogenicity or toxicity. This may be achieved for instance by mRNA or protein modifications. Similarly, in case of DNA based expression systems, DNA immunogenicity or toxicity may be decreased. gRNA immunogenicity or toxicity may be optimized by decreasing gRNA immunogenicity or toxicity. This may be achieved for instance by gRNA modifications. Similarly, in case of DNA based expression systems, DNA immunogenicity or toxicity may be decreased. CRISPR-Cas complex immunogenicity or toxicity may be optimized by decreasing CRISPR effector immunogenicity or toxicity and/or gRNA immunogenicity or toxicity as above, or by selecting the least immunogenic or toxic CRISPR effector/gRNA combination. Similarly, in case of DNA based expression systems, DNA immunogenicity or toxicity may be decreased. CRISPR effector protein or mRNA dose or titer may be optimized by selecting dosage or titer to minimize toxicity and/or maximize specificity and/or efficacy. gRNA dose or titer may be optimized by selecting dosage or titer to minimize toxicity and/or maximize specificity and/or efficacy. CRISPR-Cas complex dose or titer may be optimized by selecting dosage or titer to minimize toxicity and/or maximize specificity and/or efficacy. CRISPR effector protein size may be optimized by selecting minimal protein size to increase efficiency of delivery, in particular for virus mediated delivery. CRISPR effector, gRNA, or CRISPR-Cas complex expression level may be optimized by limiting (or extending) the duration of expression and/or limiting (or increasing) expression level. This may be achieved for instance by using self-inactivating CRISPR-Cas systems, such as including a self-targeting (e.g. CRISPR effector targeting) gRNA, by using viral vectors having limited expression duration, by using appropriate promoters for low (or high) expression levels, by combining different delivery methods for individual CRISP-Cas system components, such as virus mediated delivery of CRISPR-effector encoding nucleic acid combined with non-virus mediated delivery of gRNA, or virus mediated delivery of gRNA combined with non-virus mediated delivery of CRISPR effector protein or mRNA. CRISPR effector, gRNA, or CRISPR-Cas complex spatiotemporal expression may be optimized by appropriate choice of conditional and/or inducible expression systems, including controllable CRISPR effector activity optionally a destabilized CRISPR effector and/or a split CRISPR effector, and/or cell- or tissue-specific expression systems.

[0404] In an aspect, the invention relates to a method as described herein, comprising selection of one or more (therapeutic) target, selecting CRISPR-Cas system functionality, selecting CRISPR-Cas system mode of delivery, selecting CRISPR-Cas system delivery vehicle or expression system, and optimization of selected parameters or variables associated with the CRISPR-Cas system and/or its functionality, optionally wherein the parameters or variables are one or more selected from CRISPR effector specificity, gRNA specificity, CRISPR-Cas complex specificity, PAM restrictiveness, PAM type (natural or modified), PAM nucleotide content, PAM length, CRISPR effector activity, gRNA activity, CRISPR-Cas complex activity, target cleavage efficiency, target site selection, target sequence length, ability of effector protein to access regions of high chromatin accessibility, degree of uniform enzyme activity across genomic targets, epigenetic tolerance, mismatch/budge tolerance, CRISPR effector stability, CRISPR effector mRNA stability, gRNA stability, CRISPR-Cas complex stability, CRISPR effector protein or mRNA immunogenicity or toxicity, gRNA immunogenicity or toxicity, CRISPR-Cas complex immunogenicity or toxicity, CRISPR effector protein or mRNA dose or titer, gRNA dose or titer, CRISPR-Cas complex dose or titer, CRISPR effector protein size, CRISPR effector expression level, gRNA expression level, CRISPR-Cas complex expression level, CRISPR effector spatiotemporal expression, gRNA spatiotemporal expression, CRISPR-Cas complex spatiotemporal expression.

[0405] In an aspect, the invention relates to a method as described herein, comprising optionally selecting one or more (therapeutic) target, optionally selecting one or more CRISPR-Cas system functionality, optionally selecting one or more CRISPR-Cas system mode of delivery, optionally selecting one or more CRISPR-Cas system delivery vehicle or expression system, and optimization of selected parameters or variables associated with the CRISPR-Cas system and/or its functionality, wherein specificity, efficacy, and/or safety are optimized, and optionally wherein optimization of specificity comprises optimizing one or more parameters or variables selected from CRISPR effector specificity, gRNA specificity, CRISPR-Cas complex specificity, PAM restrictiveness, PAM type (natural or modified), PAM nucleotide content, PAM length, wherein optimization of efficacy comprises optimizing one or more parameters or variables selected from CRISPR effector activity, gRNA activity, CRISPR-Cas complex activity, target cleavage efficiency, target site selection, target sequence length, CRISPR effector protein size, ability of effector protein to access regions of high chromatin accessibility, degree of uniform enzyme activity across genomic targets, epigenetic tolerance, mismatch/budge tolerance, and wherein optimization of safety comprises optimizing one or more parameters or variables selected from CRISPR effector stability, CRISPR effector mRNA stability, gRNA stability, CRISPR-Cas complex stability, CRISPR effector protein or mRNA immunogenicity or toxicity, gRNA immunogenicity or toxicity, CRISPR-Cas complex immunogenicity or toxicity, CRISPR effector protein or mRNA dose or titer, gRNA dose or titer, CRISPR-Cas complex dose or titer, CRISPR effector expression level, gRNA expression level, CRISPR-Cas complex expression level, CRISPR effector spatiotemporal expression, gRNA spatiotemporal expression, CRISPR-Cas complex spatiotemporal expression.

[0406] In an aspect, the invention relates to a method as described herein, comprising selecting one or more (therapeutic) target, selecting one or more CRISPR-Cas system functionality, selecting one or more CRISPR-Cas system mode of delivery, selecting one or more CRISPR-Cas system delivery vehicle or expression system, and optimization of selected parameters or variables associated with the CRISPR-Cas system and/or its functionality, wherein specificity, efficacy, and/or safety are optimized, and optionally wherein optimization of specificity comprises optimizing one or more parameters or variables selected from CRISPR effector specificity, gRNA specificity, CRISPR-Cas complex specificity, PAM restrictiveness, PAM type (natural or modified), PAM nucleotide content, PAM length, wherein optimization of efficacy comprises optimizing one or more parameters or variables selected from CRISPR effector activity, gRNA activity, CRISPR-Cas complex activity, target cleavage efficiency, target site selection, target sequence length, CRISPR effector protein size, ability of effector protein to access regions of high chromatin accessibility, degree of uniform enzyme activity across genomic targets, epigenetic tolerance, mismatch/budge tolerance, and wherein optimization of safety comprises optimizing one or more parameters or variables selected from CRISPR effector stability, CRISPR effector mRNA stability, gRNA stability, CRISPR-Cas complex stability, CRISPR effector protein or mRNA immunogenicity or toxicity, gRNA immunogenicity or toxicity, CRISPR-Cas complex immunogenicity or toxicity, CRISPR effector protein or mRNA dose or titer, gRNA dose or titer, CRISPR-Cas complex dose or titer, CRISPR effector expression level, gRNA expression level, CRISPR-Cas complex expression level, CRISPR effector spatiotemporal expression, gRNA spatiotemporal expression, CRISPR-Cas complex spatiotemporal expression.

[0407] In an aspect, the invention relates to a method as described herein, comprising optimization of selected parameters or variables associated with the CRISPR-Cas system and/or its functionality, wherein specificity, efficacy, and/or safety are optimized, and optionally wherein optimization of specificity comprises optimizing one or more parameters or variables selected from CRISPR effector specificity, gRNA specificity, CRISPR-Cas complex specificity, PAM restrictiveness, PAM type (natural or modified), PAM nucleotide content, PAM length, wherein optimization of efficacy comprises optimizing one or more parameters or variables selected from CRISPR effector activity, gRNA activity, CRISPR-Cas complex activity, target cleavage efficiency, target site selection, target sequence length, CRISPR effector protein size, ability of effector protein to access regions of high chromatin accessibility, degree of uniform enzyme activity across genomic targets, epigenetic tolerance, mismatch/budge tolerance, and wherein optimization of safety comprises optimizing one or more parameters or variables selected from CRISPR effector stability, CRISPR effector mRNA stability, gRNA stability, CRISPR-Cas complex stability, CRISPR effector protein or mRNA immunogenicity or toxicity, gRNA immunogenicity or toxicity, CRISPR-Cas complex immunogenicity or toxicity, CRISPR effector protein or mRNA dose or titer, gRNA dose or titer, CRISPR-Cas complex dose or titer, CRISPR effector expression level, gRNA expression level, CRISPR-Cas complex expression level, CRISPR effector spatiotemporal expression, gRNA spatiotemporal expression, CRISPR-Cas complex spatiotemporal expression.

[0408] It will be understood that the parameters or variables to be optimized as well as the nature of optimization may depend on the (therapeutic) target, the CRISPR-Cas system functionality, the CRISPR-Cas system mode of delivery, and/or the CRISPR-Cas system delivery vehicle or expression system.

[0409] In an aspect, the invention relates to a method as described herein, comprising optimization of gRNA specificity at the population level. Preferably, said optimization of gRNA specificity comprises minimizing gRNA target site sequence variation across a population and/or minimizing gRNA off-target incidence across a population.

[0410] In an aspect, the invention relates to a method for developing or designing a CRISPR-Cas system, optionally a CRISPR-Cas system based therapy or therapeutic, comprising (a) selecting for a (therapeutic) locus of interest gRNA target sites, wherein said target sites have minimal sequence variation across a population, and from said selected target sites subselecting target sites, wherein a gRNA directed against said target sites recognizes a minimal number of off-target sites across said population, or (b) selecting for a (therapeutic) locus of interest gRNA target sites, wherein said target sites have minimal sequence variation across a population, or selecting for a (therapeutic) locus of interest gRNA target sites, wherein a gRNA directed against said target sites recognizes a minimal number of off-target sites across said population, and optionally estimating the number of (sub)selected target sites needed to treat or otherwise modulate or manipulate a population, optionally validating one or more of the (sub)selected target sites for an individual subject, optionally designing one or more gRNA recognizing one or more of said (sub)selected target sites.

[0411] In an aspect, the invention relates to a method for developing or designing a gRNA for use in a CRISPR-Cas system, optionally a CRISPR-Cas system based therapy or therapeutic, comprising (a) selecting for a (therapeutic) locus of interest gRNA target sites, wherein said target sites have minimal sequence variation across a population, and from said selected target sites subselecting target sites, wherein a gRNA directed against said target sites recognizes a minimal number of off-target sites across said population, or (b) selecting for a (therapeutic) locus of interest gRNA target sites, wherein said target sites have minimal sequence variation across a population, or selecting for a (therapeutic) locus of interest gRNA target sites, wherein a gRNA directed against said target sites recognizes a minimal number of off-target sites across said population, and optionally estimating the number of (sub)selected target sites needed to treat or otherwise modulate or manipulate a population, optionally validating one or more of the (sub)selected target sites for an individual subject, optionally designing one or more gRNA recognizing one or more of said (sub)selected target sites.

[0412] In an aspect, the invention relates to a method for developing or designing a CRISPR-Cas system, optionally a CRISPR-Cas system based therapy or therapeutic in a population, comprising (a) selecting for a (therapeutic) locus of interest gRNA target sites, wherein said target sites have minimal sequence variation across a population, and from said selected target sites subselecting target sites, wherein a gRNA directed against said target sites recognizes a minimal number of off-target sites across said population, or (b) selecting for a (therapeutic) locus of interest gRNA target sites, wherein said target sites have minimal sequence variation across a population, or selecting for a (therapeutic) locus of interest gRNA target sites, wherein a gRNA directed against said target sites recognizes a minimal number of off-target sites across said population, and optionally estimating the number of (sub)selected target sites needed to treat or otherwise modulate or manipulate a population, optionally validating one or more of the (sub)selected target sites for an individual subject, optionally designing one or more gRNA recognizing one or more of said (sub)selected target sites.

[0413] In an aspect, the invention relates to a method for developing or designing a gRNA for use in a CRISPR-Cas system, optionally a CRISPR-Cas system based therapy or therapeutic in a population, comprising (a) selecting for a locus of interest gRNA target sites, wherein said target sites have minimal sequence variation across a population, and from said selected target sites subselecting target sites, wherein a gRNA directed against said target sites recognizes a minimal number of off-target sites across said population, or (b) selecting for a (therapeutic) locus of interest gRNA target sites, wherein said target sites have minimal sequence variation across a population, or selecting for a (therapeutic) locus of interest gRNA target sites, wherein a gRNA directed against said target sites recognizes a minimal number of off-target sites across said population, and optionally estimating the number of (sub)selected target sites needed to treat or otherwise modulate or manipulate a population, optionally validating one or more of the (sub)selected target sites for an individual subject, optionally designing one or more gRNA recognizing one or more of said (sub)selected target sites.

[0414] In a further aspect, the invention relates to method for developing or designing a CRISPR-Cas system, such as a CRISPR-Cas system based therapy or therapeutic, optionally in a population; or for developing or designing a gRNA for use in a CRISPR-Cas system, optionally a CRISPR-Cas system based therapy or therapeutic, optionally in a population, comprising: selecting a set of target sequences for one or more loci in a target population, wherein the target sequences do not contain variants occurring above a threshold allele frequency in the target population (platinum target sequences); removing from said selected (platinum) target sequences any target sequences having high frequency off-target candidates (relative to other (platinum) targets in the set) to define a final target sequence set; preparing one or more, such as a set of CRISPR-Cas systems based on the final target sequence set, optionally wherein a number of CRISP-Cas systems prepared is based (at least in part) on the size of a target population.

[0415] In certain embodiments, off-target candidates/off-targets, PAM restrictiveness, target cleavage efficiency, or effector protein specificity is identified or determined using a sequencing-based double-strand break (DSB) detection assay, such as described herein elsewhere. In certain embodiments, off-target candidates/off-targets are identified or determined using a sequencing-based double-strand break (DSB) detection assay, such as described herein elsewhere. In certain embodiments, off-targets, or off target candidates have at least 1, preferably 1-3, mismatches or (distal) PAM mismatches, such as 1 or more, such as 1, 2, 3, or more (distal) PAM mismatches. In certain embodiments, sequencing-based DSB detection assay comprises labeling a site of a DSB with an adapter comprising a primer binding site, labeling a site of a DSB with a barcode or unique molecular identifier, or combination thereof, as described herein elsewhere.

[0416] It will be understood that the guide sequence of the gRNA is 100% complementary to the target site, i.e. does not comprise any mismatch with the target site. It will be further understood that “recognition” of an (off-)target site by a gRNA presupposes CRISPR-Cas system functionality, i.e. an (off-)target site is only recognized by a gRNA if binding of the gRNA to the (off-)target site leads to CRISPR-Cas system activity (such as induction of single or double strand DNA cleavage, transcriptional modulation, etc).

[0417] In certain embodiments, the target sites having minimal sequence variation across a population are characterized by absence of sequence variation in at least 99%, preferably at least 99.9%, more preferably at least 99.99% of the population. In certain embodiments, optimizing target location comprises selecting target sequences or loci having an absence of sequence variation in at least 99%, %, preferably at least 99.9%, more preferably at least 99.99% of a population. These targets are referred to herein elsewhere also as “platinum targets”. In certain embodiments, said population comprises at least 1000 individuals, such as at least 5000 individuals, such as at least 10000 individuals, such as at least 50000 individuals.

[0418] In certain embodiments, the off-target sites are characterized by at least one mismatch between the off-target site and the gRNA. In certain embodiments, the off-target sites are characterized by at most five, preferably at most four, more preferably at most three mismatches between the off-target site and the gRNA. In certain embodiments, the off-target sites are characterized by at least one mismatch between the off-target site and the gRNA and by at most five, preferably at most four, more preferably at most three mismatches between the off-target site and the gRNA.

[0419] In certain embodiments, said minimal number of off-target sites across said population is determined for high-frequency haplotypes in said population. In certain embodiments, said minimal number of off-target sites across said population is determined for high-frequency haplotypes of the off-target site locus in said population. In certain embodiments, said minimal number of off-target sites across said population is determined for high-frequency haplotypes of the target site locus in said population. In certain embodiments, the high-frequency haplotypes are characterized by occurrence in at least 0.1% of the population.

[0420] In certain embodiments, the number of (sub)selected target sites needed to treat a population is estimated based on based low frequency sequence variation, such as low frequency sequence variation captured in large scale sequencing datasets. In certain embodiments, the number of (sub)selected target sites needed to treat a population of a given size is estimated.

[0421] In certain embodiments, the method further comprises obtaining genome sequencing data of a subject to be treated; and treating the subject with a CRISPR-Cas system selected from the set of CRISPR-Cas systems, wherein the CRISPR-Cas system selected is based (at least in part) on the genome sequencing data of the individual.

[0422] In certain embodiments, the ((sub)selected) target is validated by genome sequencing, preferably whole genome sequencing.

[0423] In certain embodiments, target sequences or loci as described herein are (further) selected based on optimization of one or more parameters consisting of, PAM type (natural or modified), PAM nucleotide content, PAM length, target sequence length, PAM restrictiveness, target cleavage efficiency, and target sequence position within a gene, a locus or other genomic region.

[0424] In certain embodiments, target sequences or loci as described herein are (further) selected based on optimization of one or more of target loci location, target length, target specificity, and PAM characteristics. As used herein, PAM characteristics may comprise for instance PAM sequence, PAM length, and/or PAM GC contents. In certain embodiments, optimizing PAM characteristics comprises optimizing nucleotide content of a PAM. In certain embodiments, optimizing nucleotide content of PAM is selecting a PAM with an a motif that maximizes abundance in the one or more target loci, minimizes mutation frequency, or both. Minimizing mutation frequency can for instance be achieved by selecting PAM sequences devoid of or having low or minimal CpG.

[0425] In certain embodiments, the effector protein for each CRISPR-Cas system in the set of CRISPR-Cas systems is selected based on optimization of one or more parameters selected from the group consisting of; effector protein size, ability of effector protein to access regions of high chromatin accessibility, degree of uniform enzyme activity across genomic targets, epigenetic tolerance, mismatch/budge tolerance, effector protein specificity, effector protein stability or half-life, effector protein immunogenicity or toxicity.

[0426] In certain embodiments, optimizing target (sequence) length comprises selecting a target sequence within one or more target loci between 5 and 25 nucleotides. In certain embodiments, a target sequence is 20 nucleotides.

[0427] In certain embodiments, optimizing target specificity comprises selecting targets loci that minimize off-target candidates.

[0428] In certain embodiments, the gRNA is a tru gRNA, an escorted gRNA, or a protected gRNA.

[0429] It will be understood that the CRISPR-Cas systems according to the invention as described herein, such as the CRISPR-Cas systems for use in the methods according to the invention as described herein, may be suitably used for any type of application known for CRISPR-Cas systems, preferably in eukaryotes. In certain aspects, the application is therapeutic, preferably therapeutic in a eukaryote organism, such as including but not limited to animals (including human), plants, algae, fungi (including yeasts), etc. Alternatively, or in addition, in certain aspects, the application may involve accomplishing or inducing one or more particular traits or characteristics, such as genotypic and/or phenotypic traits or characteristics, as also described herein elsewhere.

[0430] For the invention described herein, the following criteria may be taken into account when optimizing the respective parameters or variables.

Selection of Cas proteins

### 1. Size:

[0431] Currently, CRISPR single nuclease effectors demonstrating high efficiency mammalian genome editing range from 1053 amino acids (SaCas9) to 1368 amino acids (SpCas9), (AsCpf1, 1307aa; and LbCpf1, 1246). While smaller orthologs of Cas9 do exist and cleave DNA with high efficiency in vitro, Cas9 orthologs smaller than SaCas9 have shown diminished mammalian DNA cleavage efficiency. The large size of current single effector CRISPR nucleases is challenging for both nanoparticle protein delivery and viral vector delivery strategies. For protein delivery, payload per particle is a function of 3-D protein size, and for viral delivery of single effectors, large gene size limits flexibility for multiplexing or use of large cell-type specific promoters. Considerations relating to delivery are described detailed further herein below.

### 2. Protein Search:

[0432] The ability of the CRISPR effector to access regions of high chromatin complexity can be viewed in two ways 1) this increases the versatility of the CRISPR effector as a tool for genome editing or 2) this may be undesirable due to cellular dysregulation resulting from perturbation of the genomic structure of cells contacted with the CRISPR effector. There have been reports that the most active Cas9 guides are ones that target low nucleosomal occupancy positions: elifesciences.org/content/5/e12677, and elifesciences.org/content/5/e13450; however, over a longer time scale, cleavage can still occur (also cleavage can occur during replication when the nucleosomal occupancy is moved) Considerations relating to choice of Cas and modifications thereof are described detailed further herein below.

### 3. Efficacy:

[0433] Overall efficiency: robust and uniform enzyme activity across genomic targets in regions of open chromatin is generally desirable for all single effector nucleases. On the other hand, robust and uniform enzyme activity across genomic targets with varying chromatin complexity and epigenetic marks may not be desirable for research and therapeutic applications. It has been shown that Cas9 shows robust cleavage of methylated DNA, and this increases the utility of the enzyme. On the other hand, CRISPR effector binding or cleavage at loci enriched for epigenetic marks may dysregulate cellular processes. A further aspect to be considered is whether enzymes that do not disturb chromatin structure are desirable. If cleaving a locus in a terminally differentiated cell, it may be desirable to utilize enzymes that are not capable of penetrating silenced regions of the genome. Alternatively, when cleaving a locus in a precursor of a differentiated cell type, then it may be advantageous to be able to penetrate regions of the genome inactive at the time of editing.

### 4. Specificity: Mismatch/Bulge Tolerance:

[0434] Naturally occurring Cas9 orthologs: naturally occurring CRISPR effectors show tolerance of mismatches or bulges between the RNA guide and DNA target. This tolerance is generally undesirable for therapeutic applications. For therapeutic applications, patients should be individually screened for perfect target guide RNA complementarity, and tolerance of bulges and mismatches will only increase the likelihood of off-target DNA cleavage. High specificity engineered variants have been developed, such as eSpCas9 and Cas9-HF1 for Cas9; these variants show decreased tolerance of mismatches between DNA targets and the RNA guide (relevant to mismatches in approximately the PAM distal 12-14 nucleotides of the guide RNA given 20nt of guide RNA target complementarity).

### 5. PAM Choice:

[0435] Natural PAM vs. Modified PAM: Targets for each single effector CRISPR DNA endonuclease discovered so far require a protospacer adjacent motif (PAM) flanking the guide RNA complimentary region of the target. For the DNA endonucleases discovered so far, the PAM motifs have at least 2 nucleotides of specificity, such as 2, 3, 4, 5 or more nucleotides of specificity, such as 2-4 or 2-5 nucleotides of specificity, which curtails the fraction of possible targets in the genome that can be cleaved with a single natural enzyme. Mutation of naturally occurring DNA endonucleases has resulted in protein variants with modified PAM specificities. Cumulatively, the more such variants exist for a given protein targeting different PAMs, the greater the density of genomic targets are available for use in therapeutic design (See population efficacy). Nucleotide content: Nucleotide content of PAMs can affect what fraction of the genome can be targeted with an individual protein due to differences in the abundance of a particular motif in the genome or in a specific therapeutic locus of the genome. Additionally, nucleotide content can affect PAM mutation frequencies in the genome (See population efficacy). Cas proteins with altered PAM specificity can address this issue (as described further herein). Influence of PAM length/complexity on target specificity: Cas9 interrogates the genome by first binding to a PAM site before attempting to create a stable RNA/DNA duplex by melting the double stranded DNA. Since the complexity of the PAM limits the possible space of targets interrogated, a more complex PAM will have fewer possible sites at which off-target cleavage can occur.

6. crRNA Processing Capabilities of the Enzyme: Multiplexing:

[0436] For multiplexing, crRNA processing capabilities are desirable, as a transcript expressed from a single promoter can contain multiple different crRNAs. This transcript is then processed into multiple constituent crRNAs by the protein, and multiplexed editing proceeds for each target specified by the crRNA. On the other hand, the rules for RNA endonucleolytic processing of multi crRNA transcripts into crRNAs are not fully understood. Hence, for therapeutic applications, crRNA processing may be undesirable due to off-target cleavage of endogenous RNA transcripts.

### Target Choice

### 1. Target Length:

[0437] Although most protospacer elements observed in naturally occurring Cas CRISPR arrays are longer than 20nt, protospacer complimentary regions of resulting crRNA products are often processed to 20nt (Cas9) or do not confer specificity beyond 20nt (Cpf1). Extension of the target complimentary region of the guide RNA beyond 20nt likely is positioned outside of the footprint of the protein on the guide RNA and is often processed away by exonucleases (See protected guide RNAs for further discussion).

### 2. Efficiency Screening:

[0438] Screening for CRISPR effector efficacy has been performed by studying the efficacy of knockdown of cell surface proteins using different DNA targets. These studies show some evidence that position dependent nucleotide content in CRISPR effector targets and flanking nucleotides affects the efficacy of target cleavage.

### 3. Specificity Screening:

[0439] Unbiased investigation of genome-wide CRISPR nuclease activity suggests that most off-target activity occurs at loci with at most three mismatches to the RNA guide. Current approaches for CRISPR effector target selection rank off-target candidates found in the reference human genome by both the number and position of RNA guide mismatches, with the assumption that loci containing less than 3 mismatches or containing PAM distal mismatches are more likely to be cleaved. However, in a population of individuals, this strategy is complicated by the existence of multiple haplotypes (sets of associated variants), which will contain different positions or numbers of mismatches at candidate off-target sites (See: population safety).

### Guide RNA Design

[0440] Several technologies have been developed to address different aspects of efficacy and specificity

### 1. Tru Guide:

[0441] Trimming 1-3 nt off from the 3′ end of the target complimentary region of the gRNA often decreases activity at off-target loci containing at least one mismatch to the guide RNA. Likely, with fewer nucleotides of base-pairing between the off-target and gRNA, each mismatch has a greater thermodynamic consequence to the stability of the CRISPR effector-gRNA complex with the off-target DNA. Percentage of successfully cleaved targets may be reduced in using tru guides: i.e., some sites that worked with a 20nt guide may not cut efficiently with a 17nt guide; but the ones that do work with 17nt generally cleavage as efficiently.

### 2. Protected Guide:

[0442] Protected guides utilize an extended guide RNA and/or trans RNA/DNA elements to 1) create stable structures in the sgRNA that compete with sgRNA base-pairing at a target or off-target site or 2) (optionally) extend complimentary nucleotides between the gRNA and target. For extended RNA implementations, secondary structure results from complementarity between the 3′ extension of the guide RNA and another target complimentary region of the guide RNA. For trans implementations, DNA or RNA elements bind the extended or normal length guide RNA partially obscuring the target complimentary region of the sgRNA.

### Dosage

[0443] The dosage of the CRISPR components should take into account the following factors

### 1. Target Search:

[0444] CRISPR effector/guide RNA-enzyme complexes use 3-D stochastic search to locate targets. Given equal genomic accessibility, the probability of the complex finding an off-target or on-target is similar.

### 2. Binding (Target Dwell Time):

[0445] Once located, the binding kinetics of the complex at an on-target or an off-target with few mismatches differs only slightly. Hence, target search and binding are likely not the rate-limiting steps for DNA cleavage at on-target or off-target loci. ChIP data suggests that complex dwell time does decrease accompanying increasing mismatches between the off-target locus and RNA guide, particularly in the PAM-proximal ‘seed’ region of the RNA guide.

### 3. Cutting (Thermodynamic Barrier to Assuming an Active Conformation):

[0446] A major rate-limiting step for CRISPR effector enzymatic activity appears to be configuration of the target DNA and guide RNA-protein complex in an active conformation for DNA cleavage. Increasing mismatches at off-target loci decrease the likelihood of the complex achieving an active conformation at off-target loci.

[0447] The difference between binding and cutting is why ChIP has very low predictive power as a tool for evaluating the off-target cleavage of Cas.

[0448] If the probability of finding an off-target or on-target is similar, then the difference in rate of on and off-target cleavage is likely due to the fact that the probability of cleavage at an on target sites is greater than off target sites. (See temporal control) The stochastic search means that Cas suggests that an incorrect model is to view Cas as preferentially cleaving the on-target site first and only moving onto off-target sites after on-target cleavage is saturated; instead, all sites are interrogated at random, and the probability of progression to cutting after PAM binding is what differentiates the propensity of on vs. off-target cutting.

### 4. Repetition in DNA Modification at an Individual Locus:

[0449] NHEJ repair of DNA double strand breaks is generally high fidelity (Should find exact error rate). Hence, it is likely that a nuclease must cut an individual locus many times before an error in NHEJ results in an indel at the cut site. The probability of observing an indel is the compounding probability of observing a double strand break based on 1) target search probability, 2) target dwell time, and 3) overcoming the thermodynamic barrier to DNA cleavage.

### 5. Enzyme Concentration:

[0450] Even at very low concentrations, search may still encounter an off-target prior to an on-target. Thereafter, the number and location of mismatches in an off-target, and likely the nucleotide content of the target will influence the likelihood of DNA cleavage.

[0451] Thinking about on/off target cleavage in probabilistic terms, each interaction that Cas has with the genome can be thought of as having some probability of successful cleavage. Reducing the dose will reduce the number of effector molecules available for interacting with the genome, and thus will limit the additive probability of repeated interactions at off-target sites.

### Temporal and Spatial Control of the CRISPR System

[0452] Various technologies have been developed which provide additional options for addressing efficacy, specificity and safety issues. More particularly these options can be used to allow for temporal control. More particularly these technologies allow for temporal/spatial control (as described further herein):

1. Double nickases
2. Escorted guides
3. Split-effector protein
4. “self-inactivating” systems or “governing guides”

[0453] In the following, the different variables and how they influence the design of a CRISPR-based editing system are described in more detail.

### Specificity—Select Most Specific Guide RNA

[0454] a. Guide Specificity

[0455] While early reports were fairly contradictory on the ability to accurately predict guide RNAs with limited off-target activity, statistical analysis based on a large number of data has made it possible to identify rules governing off-target effects. Doench et al. (Nat Biotechnol. 2016 February; 34(2):184-91) describe the profiling of the off-target activity of thousands of sgRNAs and the development of a metric to predict off-target sites.

[0456] Accordingly, in particular embodiments, the methods of the invention involve selecting a guide RNA which, based on statistical analysis, is less likely to generate off-target effects.

b. Guide Complementarity

[0457] It is generally envisaged that the degree of complementarity between a guide sequence and its corresponding target sequence should be as high as possible, such as more than about 50%, 60%, 75%, 80%, 85%, 90%, 95%, 97.5%, 99%, or 100%; However, in particular embodiments, a particular concern is reducing off-target interactions, e.g., reducing the guide interacting with a target sequence having low complementarity. It has been shown that certain mutations result in the CRISPR-Cas system being able to distinguish between target and off-target sequences that have greater than 80% to about 95% complementarity, e.g., 83%-84% or 88-89% or 94-95% complementarity (for instance, distinguishing between a target having 18 nucleotides from an off-target of 18 nucleotides having 1, 2 or 3 mismatches). Accordingly, in particular embodiments, the guide is selected such that the degree of complementarity between a guide sequence and its corresponding target sequence is greater than 94.5% or 95% or 95.5% or 96% or 96.5% or 97% or 97.5% or 98% or 98.5% or 99% or 99.5% or 99.9%, or 100%. Off target is less than 100% or 99.9% or 99.5% or 99% or 99% or 98.5% or 98% or 97.5% or 97% or 96.5% or 96% or 95.5% or 95% or 94.5% or 94% or 93% or 92% or 91% or 90% or 89% or 88% or 87% or 86% or 85% or 84% or 83% or 82% or 81% or 80% complementarity between the sequence and the guide, with it advantageous that off target is 100% or 99.9% or 99.5% or 99% or 99% or 98.5% or 98% or 97.5% or 97% or 96.5% or 96% or 95.5% or 95% or 94.5% complementarity between the sequence and the guide.

c. Select Guide/Enzyme Concentration

[0458] For minimization of toxicity and off-target effect, it will be important to control the concentration of Cas protein and guide RNA delivered. Optimal concentrations of Cas protein and guide RNA can be determined by testing different concentrations in a cellular or non-human eukaryote animal model and using deep sequencing the analyze the extent of modification at potential off-target genomic loci. For example, for the guide sequence targeting 5′-GAGTCCGAGCAGAAGAAGAA-3′ (SEQ ID NO: 194) in the EMX1 gene of the human genome, deep sequencing can be used to assess the level of modification at the following two off-target loci, 1: 5′-GAGTCCTAGCAGGAGAAGAA-3′ (SEQ ID NO: 195) and 2: 5′-GAGTCTAAGCAGAAGAAGAA-3′ (SEQ ID NO: 196). The concentration that gives the highest level of on-target modification while minimizing the level of off-target modification should be chosen for in vivo delivery.

### Selection Based on Specificity

[0459] a. Enzyme Modifications to Enhance Specificity

[0460] In particular embodiments, a reduction of off-target cleavage is ensured by destabilizing strand separation, more particularly by introducing mutations in the Cas enzyme decreasing the positive charge in the DNA interacting regions (as described herein and further exemplified for Cas9 by Slaymaker et al. 2016 (Science, 1; 351(6268):84-8). In further embodiments, a reduction of off-target cleavage is ensured by introducing mutations into Cas enzyme which affect the interaction between the target strand and the guide RNA sequence, more particularly disrupting interactions between Cas and the phosphate backbone of the target DNA strand in such a way as to retain target specific activity but reduce off-target activity (as described for Cas9 by Kleinstiver et al. 2016, Nature, 28; 529(7587):490-5). In particular embodiments, the off-target activity is reduced by way of a modified Cas wherein both interaction with target strand and non-target strand are modified compared to wild-type Cas.

[0461] The methods and mutations which can be employed in various combinations to increase or decrease activity and/or specificity of on-target vs. off-target activity, or increase or decrease binding and/or specificity of on-target vs. off-target binding, can be used to compensate or enhance mutations or modifications made to promote other effects. Such mutations or modifications made to promote other effects include mutations or modification to the Cas effector protein and or mutation or modification made to a guide RNA.

[0462] With a similar strategy used to improve Cas9 specificity (Slaymaker et al. 2015 “Rationally engineered Cas9 nucleases with improved specificity”), specificity of Cas can be improved by mutating residues that stabilize the non-targeted DNA strand. This may be accomplished without a crystal structure by using linear structure alignments to predict 1) which domain of Cas binds to which strand of DNA and 2) which residues within these domains contact DNA.

[0463] However, this approach may be limited due to poor conservation of Cas with known proteins. Thus it may be desirable to probe the function of all likely DNA interacting amino acids (lysine, histidine and arginine).

[0464] Positively charged residues in the RuvC domain are more conserved throughout Cas proteins than those in the Rad50 domain indicating that RuvC residues are less evolutionarily flexible. This suggests that rigid control of nucleic acid binding is needed in this domain (relative to the Rad50 domain). Therefore, it is possible this domain cuts the targeted DNA strand because of the requirement for RNA:DNA duplex stabilization (precedent in Cas9). Furthermore, more arginines are present in the RuvC domain (5% of RuvC residues 904 to 1307 vs 3.8% in the proposed Rad50 domains) suggesting again that RuvC targets one of the DNA strands. Arginines are more involved in binding nucleic acid major and minor grooves (Rohs Nature 2009: rohslab.cmb.usc.edu/Papers/Rohs_etal_Nature.pdf). Major/minor grooves would only be present in a duplex (such as DNA:RNA targeting duplex), further suggesting that RuvC may be involved in cutting.

[0465] Based on the structural analysis of the RuvC and Rad50 domains, it can be deduced what the relevant domains look like in Cas, and infer which regions and residues may contact DNA. Accordingly, in certain embodiments the Cpf1 enzyme is modified by mutation of one or more residues (in the RuvC domain) including but not limited positions R909, R912, R930, R947, K949, R951, R955, K965, K968, K1000, K1002, R1003, K1009, K1017, K1022, K1029, K1035, K1054, K1072, K1086, R1094, K1095, K1109, K1118, K1142, K1150, K1158, K1159, R1220, R1226, R1242, and/or R1252 with reference to amino acid position numbering of AsCpf1 (Acidaminococcus sp. BV3L6). Additionally or alternatively, in certain embodiments, the Cpf1 enzyme is modified by mutation of one or more residues (in the RAD50) domain including but not limited positions K324, K335, K337, R331, K369, K370, R386, R392, R393, K400, K404, K406, K408, K414, K429, K436, K438, K459, K460, K464, R670, K675, R681, K686, K689, R699, K705, R725, K729, K739, K748, and/or K752 with reference to amino acid position numbering of AsCpf1 (Acidaminococcus sp. BV3L6).

[0466] From these specific observations about AsCpf1 similar residues can be identified in Cas from other species by sequence alignments. In certain embodiments, the Cpf1 enzyme is modified by mutation of one or more residues including but not limited positions R912, T923, R947, K949, R951, R955, K965, K968, K1000, R1003, K1009, K1017, K1022, K1029, K1072, K1086, F1103, R1226, and/or R1252 with reference to amino acid position numbering of AsCpf1 (Acidaminococcus sp. BV3L6). In certain embodiments, the enzyme is modified by mutation of one or more residues including but not limited positions R833, R836, K847, K879, K881, R883, R887, K897, K900, K932, R935, K940, K948, K953, K960, K984, K1003, K1017, R1033, R1138, R1165, and/or R1252 with reference to amino acid position numbering of LbCpf1 (Lachnospiraceae bacterium ND2006).

b. Selecting Suitable PAM Recognition

[0467] The requirement of a protospacer adjacent motif (PAM) of most CRISPR effector proteins, ensures another level of specificity in that only the target which is preceded by the relevant motif for the enzyme, will be cleaved. Thus, in particular embodiments, where available it may be of interest to select an effector protein with a stringent PAM so as to reduce off-target effects. Such an effector protein may be a Cas ortholog or an effector protein having altered specificity.

[0468] On the other hand, the use of a Cas effector protein can be limited by its protospacer adjacent motif (PAM), in that it will only be able to robustly cleave target sites preceded by said motif. For instance, the Acidaminococcus sp. BV3L6 Cpf1 (AsCpf1), which has been successfully harnessed for genome editing can only cleave target sites precede by a TTTV protospacer adjacent motif (PAM), which limits its practical utility. Where broad applicability is desirable or required for multiplexing, the selection of an effector protein with a different PAM specificity may be of interest. Again, this altered specificity may be found in a Cas ortholog; However, it has been found that the Cas effector protein can be mutated to modify its PAM specificity.

[0469] Modification of PAM specificity has been performed by a structure-guided saturation mutagenesis screen to increase the targeting range of Cas (Linyi Gao et al. 2016, BioRxiv, dx.doi.org/10.1101/091611). Two variants of AsCpf1 were engineered with the mutations S542R/K607R and S542R/K548V/N552R that can cleave target sites with TYCV/CCCC and TATV PAMs, respectively, with enhanced activities in vitro and in human cells. Genome-wide assessment of off-target activity indicated that these variants retain a high level of DNA targeting specificity. It was found that by the provision of the additional AsCpf1 effector protein variants, this results in the addition of one cleavage site for every ˜8.7 bp in non-repetitive regions of the human genome.

[0470] Further Cas mutants are also envisaged herein. In particular embodiments, a mutated Cas is used wherein the mutated Cas comprises one or more mutated amino acid residue at position 11, 12, 13, 14, 15, 16, 17, 34, 36, 39, 40, 43, 46, 47, 50, 54, 57, 58, 111, 126, 127, 128, 129, 130, 131, 132, 133, 134, 135, 136, 157, 158, 159, 160, 161, 162, 163, 164, 165, 166, 167, 168, 169, 170, 171, 172, 173, 174, 175, 176, 177, 178, 532, 533, 534, 535, 536, 537, 538, 539, 540, 541, 542, 543, 544, 545, 546, 547, 548, 549, 550, 551, 552, 553, 554, 555, 556, 565, 566, 567, 568, 569, 570, 571, 572, 573, 574, 575, 592, 593, 594, 595, 596, 597, 598, 599, 600, 601, 602, 603, 604, 605, 606, 607, 608, 609, 610, 611, 612, 613, 614, 615, 616, 617, 618, 619, 620, 626, 627, 628, 629, 630, 631, 632, 633, 634, 635, 636, 637, 638, 642, 643, 644, 645, 646, 647, 648, 649, 651, 652, 653, 654, 655, 656, 676, 679, 680, 682, 683, 684, 685, 686, 687, 688, 689, 690, 691, 692, 693, 707, 711, 714, 715, 716, 717, 718, 719, 720, 721, 722, 739, 765, 768, 769, 773, 777, 778, 779, 780, 781, 782, 783, 784, 785, 786, 871, 872, 873, 874, 875, 876, 877, 878, 879, 880, 881, 882, 883, 884, or 1048; preferably, one or more mutated amino acid residue at position 130, 131, 132, 133, 134, 135, 136, 162, 163, 164, 165, 166, 167, 168, 169, 170, 171, 172, 173, 174, 175, 176, 177, 536, 537, 538, 539, 540, 541, 542, 543, 544, 545, 546, 547, 548, 549, 550, 551, 552, 570, 571, 572, 573, 595, 596, 597, 598, 599, 600, 601, 602, 603, 604, 605, 606, 607, 608, 609, 610, 611, 612, 613, 614, 615, 630, 631, 632, 646, 647, 648, 649, 650, 651, 652, 653, 683, 684, 685, 686, 687, 688, 689, or 690; more preferably one or more mutated amino acid residue at position 539, 542, 547, 548, 550, 551, 552, 167, 604, and/or 607 of AsCpf1, or the corresponding position of an AsCpf1 orthologue, homologue, or variant, preferably mutated amino acid residues at positions 542 or 542 and 607, wherein said mutations preferably are 542R and 607R, such as S542R and K607R; or preferably mutated amino acid residues at positions 542 and 548 (and optionally 552), wherein said mutations preferably are 542R and 548V (and optionally 552R), such as S542R and K548V (and optionally N552R); or at position 532, 538, 542, and/or 595 of LbCpf1, or the corresponding position of an AsCpf1 orthologue, homologue, or variant, preferably mutated amino acid residues at positions 532 or 532 and 595, wherein said mutations preferably are 532R and 595R, such as G532R and K595R; or preferably mutated amino acid residues at positions 532 and 538 (and optionally 542), wherein said mutations preferably are 532R and 538V (and optionally 542R), such as G532R and K538V (and optionally Y542R).

[0471] Accordingly, these variants increase the targeting range, providing a useful addition to the CRISPR/Cas genome engineering toolbox. At the same time, the provision of Cas effector proteins with alternative PAM specificity allows for the selection of a particular variant with optimal specificity for a particular target sequence.

### System Approaches to Reduce Off-Target Effects:

[0472] a. Double Nickase

[0473] Alternatively, to minimize the level of toxicity and off-target effect, a Cas nickase can be used with a pair of guide RNAs targeting a site of interest. Guide sequences and strategies to minimize toxicity and off-target effects can be as in WO 2014/093622 (PCT/US2013/074667); or, via mutation as described herein.

[0474] The invention thus contemplates methods of using two or more nickases, in particular a dual or double nickase approach. In some aspects and embodiments, a single type FnCpf1, AsCpf1 or LbCpf1 nickase may be delivered, for example a modified FnCpf1, AsCpf1 or LbCpf1 or a modified FnCpf1, AsCpf1 or LbCpf1 nickase as described herein. This results in the target DNA being bound by two FnCpf1 nickases. In addition, it is also envisaged that different orthologs may be used, e.g., an FnCpf1, AsCpf1 or LbCpf1 nickase on one strand (e.g., the coding strand) of the DNA and an ortholog on the non-coding or opposite DNA strand. The ortholog can be, but is not limited to, a Cas nickase such as a AsCpf1 nickase or a LbCpf1 nickase or FnCpf1 nickase. It may be advantageous to use two different orthologs that require different PAMs and may also have different guide requirements, thus allowing a greater deal of control for the user. In certain embodiments, DNA cleavage will involve at least four types of nickases, wherein each type is guided to a different sequence of target DNA, wherein each pair introduces a first nick into one DNA strand and the second introduces a nick into the second DNA strand. In such methods, at least two pairs of single stranded breaks are introduced into the target DNA wherein upon introduction of first and second pairs of single-strand breaks, target sequences between the first and second pairs of single-strand breaks are excised. In certain embodiments, one or both of the orthologs is controllable, i.e. inducible.

b. Escorted Guides

[0475] The methods provided herein may also involve the use of escorted Cas CRISPR-Cas systems or complexes, especially such a system involving an escorted Cas CRISPR-Cas system guide. By “escorted” is meant that the CRISPR-Cas system or complex or guide is delivered to a selected time or place within a cell, so that activity of the CRISPR-Cas system or complex or guide is spatially or temporally controlled. For example, the activity and destination of the CRISPR-Cas system or complex or guide may be controlled by an escort RNA aptamer sequence that has binding affinity for an aptamer ligand, such as a cell surface protein or other localized cellular component. Alternatively, the escort aptamer may for example be responsive to an aptamer effector on or in the cell, such as a transient effector, such as an external energy source that is applied to the cell at a particular time. The principle of escorted guides and embodiments thereof are described in detail in WO2016094874 incorporated by reference herein.

[0476] Aptamers are biomolecules that can be designed or selected to bind tightly to other ligands, for example using a technique called systematic evolution of ligands by exponential enrichment (SELEX; Tuerk C, Gold L: “Systematic evolution of ligands by exponential enrichment: RNA ligands to bacteriophage T4 DNA polymerase.” Science 1990, 249:505-510). Nucleic acid aptamers can for example be selected from pools of random-sequence oligonucleotides, with high binding affinities and specificities for a wide range of biomedically relevant targets, suggesting a wide range of therapeutic utilities for aptamers (Keefe, Anthony D., Supriya Pai, and Andrew Ellington. “Aptamers as therapeutics.” Nature Reviews Drug Discovery 9.7 (2010): 537-550). These characteristics also suggest a wide range of uses for aptamers as drug delivery vehicles (Levy-Nissenbaum, Etgar, et al. “Nanotechnology and aptamers: applications in drug delivery.” Trends in biotechnology 26.8 (2008): 442-449; and, Hicke B J, Stephens A W. “Escort aptamers: a delivery service for diagnosis and therapy.” J Clin Invest 2000, 106:923-928.). Aptamers may also be constructed that function as molecular switches, responding to a que by changing properties, such as RNA aptamers that bind fluorophores to mimic the activity of green fluorescent protein (Paige, Jeremy S., Karen Y. Wu, and Samie R. Jaffrey. “RNA mimics of green fluorescent protein.” Science 333.6042 (2011): 642-646). It has also been suggested that aptamers may be used as components of targeted siRNA therapeutic delivery systems, for example targeting cell surface proteins (Zhou, Jiehua, and John J. Rossi. “Aptamer-targeted cell-specific RNA interference.” Silence 1.1 (2010): 4). The aptamers used in this aspect are designed to improve gRNA delivery, including delivery across the cellular membrane, to intracellular compartments, or into the nucleus. Such a structure can include, either in addition to the one or more aptamer(s) or without such one or more aptamer(s), moiety(ies) so as to render the guide deliverable, inducible or responsive to a selected effector. In particular embodiments, a gRNA is designed that responds to normal or pathological physiological conditions, including without limitation pH, hypoxia, 02 concentration, temperature, protein concentration, enzymatic concentration, lipid structure, light exposure, mechanical disruption (e.g. ultrasound waves), magnetic fields, electric fields, or electromagnetic radiation. Accordingly, in particular embodiments, the escort aptamer has binding affinity for an aptamer ligand on or in the cell, or the escort aptamer is responsive to a localized aptamer effector on or in the cell, wherein the presence of the aptamer ligand or effector on or in the cell is spatially or temporally restricted.

[0477] Once intended alterations have been introduced, such as by editing intended copies of a gene in the genome of a cell, continued CRISPR/Cas expression in that cell is no longer necessary. Indeed, sustained expression would be undesirable in certain cases in case of off-target effects at unintended genomic sites, etc. Thus time-limited expression is of interest.

[0478] Inducible expression offers one approach, but in addition Applicants have engineered a Self-Inactivating CRISPR-Cas system that relies on the use of a non-coding guide target sequence within the CRISPR vector itself. Thus, after expression begins, the CRISPR system will lead to its own destruction, but before destruction is complete it will have time to edit the genomic copies of the target gene (which, with a normal point mutation in a diploid cell, requires at most two edits). Simply, the self-inactivating CRISPR-Cas system includes additional RNA (i.e., guide RNA) that targets the coding sequence for the CRISPR enzyme itself or that targets one or more non-coding guide target sequences complementary to unique sequences present in one or more of the following: (a) within the promoter driving expression of the non-coding RNA elements, (b) within the promoter driving expression of the Cas gene, (c) within 100 bp of the ATG translational start codon in the Cas coding sequence, (d) within the inverted terminal repeat (iTR) of a viral delivery vector, e.g., in an AAV genome.

[0479] Examples of inducible systems are light responsive systems. Light responsiveness of an inducible system are achieved via the activation and binding of cryptochrome-2 and CIB1. Blue light stimulation induces an activating conformational change in cryptochrome-2, resulting in recruitment of its binding partner CIB1. This binding is fast and reversible, achieving saturation in <15 sec following pulsed stimulation and returning to baseline <15 min after the end of stimulation. These rapid binding kinetics result in a system temporally bound only by the speed of transcription/translation and transcript/protein degradation, rather than uptake and clearance of inducing agents. Crytochrome-2 activation is also highly sensitive, allowing for the use of low light intensity stimulation and mitigating the risks of phototoxicity. Further, in a context such as the intact mammalian brain, variable light intensity may be used to control the size of a stimulated region, allowing for greater precision than vector delivery alone may offer.

[0480] In particular embodiments, energy sources such as electromagnetic radiation, sound energy or thermal energy can induce the guide. Advantageously, the electromagnetic radiation is a component of visible light. In a preferred embodiment, the light is a blue light with a wavelength of about 450 to about 495 nm. In an especially preferred embodiment, the wavelength is about 488 nm. In another preferred embodiment, the light stimulation is via pulses. The light power may range from about 0-9 mW/cm2. In a preferred embodiment, a stimulation paradigm of as low as 0.25 sec every 15 sec should result in maximal activation.

[0481] In particular embodiments, the system is chemically inducible. Exemplary designs of chemical inducible systems include: 1. ABI-PYL based system inducible by Abscisic Acid (ABA) (see, e.g., stke.sciencemag.org/cgi/content/abstract/sigtrans;4/164/rs2), 2. FKBP-FRB based system inducible by rapamycin (or related chemicals based on rapamycin) (see, e.g., www.nature.com/nmeth/journal/v2/n6/full/nmeth763.html), 3. GID1-GAI based system inducible by Gibberellin (GA) (see, e.g., www.nature.com/nchembio/journal/v8/n5/full/nchembio.922.html). Another chemical inducible system is an estrogen receptor (ER) based system inducible by 4-hydroxytamoxifen (4OHT) (see, e.g., www.pnas.org/content/104/3/1027.abstract). A mutated ligand-binding domain of the estrogen receptor called ERT2 translocates into the nucleus of cells upon binding of 4-hydroxytamoxifen. In further embodiments of the invention any naturally occurring or engineered derivative of any nuclear receptor, thyroid hormone receptor, retinoic acid receptor, estrogen receptor, estrogen-related receptor, glucocorticoid receptor, progesterone receptor, androgen receptor may be used in inducible systems analogous to the ER based inducible system.

[0482] In particular embodiments, the chemical inducible system is based on change in sub-cellular localization. The polypeptide can include a DNA binding domain comprising at least five or more Transcription activator-like effector (TALE) monomers and at least one or more half-monomers specifically ordered to target the genomic locus of interest linked to at least one or more effector domains are further linker to a chemical or energy sensitive protein. This protein will lead to a change in the sub-cellular localization of the entire polypeptide (i.e. transportation of the entire polypeptide from cytoplasm into the nucleus of the cells) upon the binding of a chemical or energy transfer to the chemical or energy sensitive protein. This transportation of the entire polypeptide from one sub-cellular compartments or organelles, in which its activity is sequestered due to lack of substrate for the effector domain, into another one in which the substrate is present would allow the entire polypeptide to come in contact with its desired substrate (i.e. genomic DNA in the mammalian nucleus) and result in activation or repression of target gene expression.

[0483] Another inducible system is based on the design using Transient receptor potential (TRP) ion channel based system inducible by energy, heat or radio-wave (see, e.g., www.sciencemag.org/content/336/6081/604). These TRP family proteins respond to different stimuli, including light and heat. When this protein is activated by light or heat, the ion channel will open and allow the entering of ions such as calcium into the plasma membrane. This influx of ions will bind to intracellular ion interacting partners linked to a polypeptide including the guide and the other components of the CRISPR-Cas complex or system, and the binding will induce the change of sub-cellular localization of the polypeptide, leading to the entire polypeptide entering the nucleus of cells. Once inside the nucleus, the guide protein and the other components of the CRISPR-Cas complex will be active and modulating target gene expression in cells. This type of system could also be used to induce the cleavage of a genomic locus of interest in a cell; and, in this regard, it is noted that the Cas enzyme is a nuclease. The light could be generated with a laser or other forms of energy sources. The heat could be generated by raise of temperature results from an energy source, or from nano-particles that release heat after absorbing energy from an energy source delivered in the form of radio-wave.

[0484] Photoinducibility provides the potential for spatial precision. Taking advantage of the development of optrode technology, a stimulating fiber optic lead may be placed in a precise brain region. Stimulation region size may then be tuned by light intensity. This may be done in conjunction with the delivery of the CRISPR-Cas system or complex of the invention, or, in the case of transgenic Cas animals, guide RNA of the invention may be delivered and the optrode technology can allow for the modulation of gene expression in precise brain regions. A culture medium for culturing host cells includes a medium commonly used for tissue culture, such as M199-earle base, Eagle MEM (E-MEM), Dulbecco MEM (DMEM), SC-UCM102, UP-SFM (GIBCO BRL), EX-CELL302 (Nichirei), EX-CELL293-S(Nichirei), TFBM-01 (Nichirei), ASF104, among others. Suitable culture media for specific cell types may be found at the American Type Culture Collection (ATCC) or the European Collection of Cell Cultures (ECACC). Culture media may be supplemented with amino acids such as L-glutamine, salts, anti-fungal or anti-bacterial agents such as Fungizone®, penicillin-streptomycin, animal serum, and the like. The cell culture medium may optionally be serum-free.

[0485] Temporal precision can also be achieved in vivo. This may be used to alter gene expression during a particular stage of development. This may be used to time a genetic cue to a particular experimental window. For example, genes implicated in learning may be overexpressed or repressed only during the learning stimulus in a precise region of the intact rodent or primate brain. Further, the invention may be used to induce gene expression changes only during particular stages of disease development. For example, an oncogene may be overexpressed only once a tumor reaches a particular size or metastatic stage. Conversely, proteins suspected in the development of Alzheimer's may be knocked down only at defined time points in the animal's life and within a particular brain region. Although these examples do not exhaustively list the potential applications of the invention, they highlight some of the areas in which the invention may be a powerful technology.

c. Protected Guide RNAs

[0486] In one aspect, it is of interest to further enhance the specificity of Cas given individual guide RNAs through thermodynamic tuning of the binding specificity of the guide RNA to target DNA. This is a general approach of introducing mismatches, elongation or truncation of the guide sequence to increase/decrease the number of complimentary bases vs. mismatched bases shared between a genomic target and its potential off-target loci, in order to give thermodynamic advantage to targeted genomic loci over genomic off-targets. Thus it can be of interest to modify the guide sequence by secondary structure to increase the specificity of the CRISPR-Cas system whereby the secondary structure can protect against exonuclease activity. This can be ensured by hybridizing a “protector RNA” to a guide sequence, wherein the “protector RNA” is an RNA strand complementary to the 5′ end of the guide RNA (gRNA), to thereby generate a partially double-stranded gRNA. Protecting the mismatched bases with a perfectly complementary protector sequence decreases the likelihood of target DNA binding to the mismatched basepairs at the 3′ end. In particular embodiments, additional sequences comprising an extended length may also be present. The principle of using protected guide RNAs is described in detail in WO/2016/094867, which is incorporated herein by reference.

[0487] Guide RNA (gRNA) extensions matching the genomic target provide gRNA protection and enhance specificity. Extension of the gRNA with matching sequence distal to the end of the spacer seed for individual genomic targets thus provides enhanced specificity. In particular embodiments, stable forms arise from protective states, where the extension forms a closed loop with the gRNA seed due to complimentary sequences in the spacer extension and the spacer seed. Thus, the protected guide concept also includes sequences matching the genomic target sequence distal of the 20mer spacer-binding region. Thermodynamic prediction can be used to predict completely matching or partially matching guide extensions that result in protected gRNA states as described in WO/2016/094867.

[0488] An extension sequence which corresponds to the extended length (ExL) may optionally be attached directly to the guide sequence at the 3′ end of the protected guide sequence. The extension sequence may be 2 to 12 nucleotides in length. Preferably ExL may be denoted as 0, 2, 4, 6, 8, 10 or 12 nucleotides in length. In a preferred embodiment the ExL is denoted as 0 or 4 nucleotides in length. In a more preferred embodiment the ExL is 4 nucleotides in length. The extension sequence may or may not be complementary to the target sequence. An extension sequence may further optionally be attached directly to the guide sequence at the 5′ end of the protected guide sequence as well as to the 3′ end of a protecting sequence. As a result, the extension sequence serves as a linking sequence between the protected sequence and the protecting sequence. Without wishing to be bound by theory, such a link may position the protecting sequence near the protected sequence for improved binding of the protecting sequence to the protected sequence.

d. Formation of a RISC Through Guide Engineering

[0489] In some embodiments, the guide may be a protected guide (e.g. a pgRNA) or an escorted guide (e.g. an esgRNA) as described herein. Both of these, in some embodiments, make use of RISC. A RISC is a key component of RNAi. RISC (RNA-induced silencing complex) is a multiprotein, specifically a ribonucleoprotein, complex which incorporates one strand of a double-stranded RNA (dsRNA) fragment, such as small interfering RNA (siRNA) or microRNA (miRNA), which acts as a template for RISC to recognize a complementary messenger RNA (mRNA) transcript. The mRNA is thus cleaved by one of the components of the RISC.

[0490] As such, the formation of a RISC is advantageous in some embodiments. Guide RNAs according to various aspects of the present invention, including but not limited to protected and/or escorted guide RNAs, may be adapted to include RNA nucleotides that promote formation of a RISC, for example in combination with an siRNA or miRNA that may be provided or may, for instance, already be expressed in a cell. This may be useful, for instance, as a self-inactivating system to clear or degrade the guide.

[0491] Thus, the guide RNA may comprise a sequence complementary to a target miRNA or an siRNA, which may or may not be present within a cell. In this way, only when the miRNA or siRNA is present, for example through expression (by the cell or through human intervention), is there binding of the RNA sequence to the miRNA or siRNA which then results in cleavage of the guide RNA an RNA-induced silencing complex (RISC) within the cell. Therefore, in some embodiments, the guide RNA comprises an RNA sequence complementary to a target miRNA or siRNA, and binding of the guide RNA sequence to the target miRNA or siRNA results in cleavage of the guide RNA by an RNA-induced silencing complex (RISC) within the cell.

[0492] RISC formation through use of escorted guides is described in WO2016094874, RISC formation through use of protected guides is described in WO/2016/094867.

e. Use of Inducible Systems

[0493] In some embodiments, a CRISPR enzyme may form a component of an inducible system. The inducible nature of the system would allow for spatiotemporal control of gene editing or gene expression using a form of energy. The form of energy may include but is not limited to electromagnetic radiation, sound energy, chemical energy and thermal energy. Examples of inducible system include tetracycline inducible promoters (Tet-On or Tet-Off), small molecule two-hybrid transcription activations systems (FKBP, ABA, etc), or light inducible systems (Phytochrome, LOV domains, or cryptochrome). In one embodiment, the CRISPR enzyme may be a part of a Light Inducible Transcriptional Effector (LITE) to direct changes in transcriptional activity in a sequence-specific manner. The components of a light may include a CRISPR enzyme, a light-responsive cytochrome heterodimer (e.g. from Arabidopsis thaliana), and a transcriptional activation/repression domain. Further examples of inducible DNA binding proteins and methods for their use are provided in U.S. 61/736,465 and U.S. 61/721,283, and WO 2014/018423 A2 which is hereby incorporated by reference in its entirety.

f. Use of Inducible/Split Effector Enzymes

[0494] In an aspect the invention provides a (non-naturally occurring or engineered) inducible CRISPR protein according to the invention as described herein (CRISPR-Cas system), comprising:

[0495] a first CRISPR protein fusion construct attached to a first half of an inducible dimer and a second CRISPR protein fusion construct attached to a second half of the inducible dimer, wherein the first Cas fusion construct is operably linked to one or more nuclear localization signals, wherein the second CRISPR protein fusion construct is operably linked to one or more nuclear export signals, wherein contact with an inducer energy source brings the first and second halves of the inducible dimer together, wherein bringing the first and second halves of the inducible dimer together allows the first and second CRISPR protein fusion constructs to constitute a functional CRISPR protein (optionally wherein the CRISPR-Cas system comprises a guide RNA (gRNA) comprising a guide sequence capable of hybridizing to a target sequence in a genomic locus of interest in a cell, and wherein the functional CRISPR-Cas system binds to the target sequence and, optionally, edits the genomic locus to alter gene expression).

[0496] In an aspect of the invention in the inducible CRISPR-Cas system, the inducible dimer is or comprises or consists essentially of or consists of an inducible heterodimer. In an aspect, in inducible CRISPR-Cas system, the first half or a first portion or a first fragment of the inducible heterodimer is or comprises or consists of or consists essentially of an FKBP, optionally FKBP12. In an aspect of the invention, in the inducible CRISPR-Cas system, the second half or a second portion or a second fragment of the inducible heterodimer is or comprises or consists of or consists essentially of FRB. In an aspect of the invention, in the inducible CRISPR-Cas system, the arrangement of the first CRISPR fusion construct is or comprises or consists of or consists essentially of N′ terminal CRISPR part-FRB-NES. In an aspect of the invention, in the inducible CRISPR-Cas system, the arrangement of the first CRISP fusion construct is or comprises or consists of or consists essentially of NES-N′ terminal CRISP part-FRB-NES. In an aspect of the invention, in the inducible CRISPR-Cas system, the arrangement of the second CRISP fusion construct is or comprises or consists essentially of or consists of C′ terminal CRISP part-FKBP-NLS. In an aspect the invention provides in the inducible Cas CRISPR-Cas system, the arrangement of the second CRISP fusion construct is or comprises or consists of or consists essentially of NLS-C′ terminal CRISP part-FKBP-NLS. In an aspect, in inducible CRISPR-Cas system there can be a linker that separates the CRISP part from the half or portion or fragment of the inducible dimer. In an aspect, in the inducible CRISPR-Cas system, the inducer energy source is or comprises or consists essentially of or consists of rapamycin. In an aspect, in inducible CRISPR-Cas system, the inducible dimer is an inducible homodimer. In an aspect, in an inducible Cpf1 CRISPR-Cas system, the Cpf1 is AsCpf1, LbCpf1 or FnCpf1.

[0497] In an aspect, the invention provides a (non-naturally occurring or engineered) inducible CRISPR-Cas system, comprising: a first CRISPR fusion construct attached to a first half of an inducible heterodimer and a second CRISPR fusion construct attached to a second half of the inducible heterodimer, wherein the first CRISPR fusion construct is operably linked to one or more nuclear localization signals, wherein the second CRISPR fusion construct is operably linked to a nuclear export signal, wherein contact with an inducer energy source brings the first and second halves of the inducible heterodimer together, wherein bringing the first and second halves of the inducible heterodimer together allows the first and second CRISPR fusion constructs to constitute a functional CRISPR (optionally wherein the CRISPR-Cas system comprises a guide RNA (gRNA) comprising a guide sequence capable of hybridizing to a target sequence in a genomic locus of interest in a cell, and wherein the functional CRISPR-Cas system edits the genomic locus to alter gene expression).

[0498] Accordingly, the invention comprehends inter alia homodimers as well as heterodimers, dead-CRISPR or CRISPR protein having essentially no nuclease activity, e.g., through mutation, systems or complexes wherein there is one or more NLS and/or one or more NES; functional domain(s) linked to split Cas9; methods, including methods of treatment, and uses.

[0499] An inducer energy source may be considered to be simply an inducer or a dimerizing agent. The term ‘inducer energy source’ is used herein throughout for consistency. The inducer energy source (or inducer) acts to reconstitute the enzyme. In some embodiments, the inducer energy source brings the two parts of the enzyme together through the action of the two halves of the inducible dimer. The two halves of the inducible dimer therefore are brought tougher in the presence of the inducer energy source. The two halves of the dimer will not form into the dimer (dimerize) without the inducer energy source.

[0500] Thus, the two halves of the inducible dimer cooperate with the inducer energy source to dimerize the dimer. This in turn reconstitutes the CRISPR by bringing the first and second parts of the CRISPR together.

[0501] The CRISPR protein fusion constructs each comprise one part of the split CRISPR protein. These are fused, preferably via a linker such as a GlySer linker described herein, to one of the two halves of the dimer. The two halves of the dimer may be substantially the same two monomers that together that form the homodimer, or they may be different monomers that together form the heterodimer. As such, the two monomers can be thought of as one half of the full dimer.

[0502] The CRISPR protein is split in the sense that the two parts of the CRISPR protein enzyme substantially comprise a functioning CRISPR protein. That CRISPR protein may function as a genome editing enzyme (when forming a complex with the target DNA and the guide), such as a nickase or a nuclease (cleaving both strands of the DNA), or it may be a dead-CRISPR protein which is essentially a DNA-binding protein with very little or no catalytic activity, due to typically mutation(s) in its catalytic domains.

[0503] The two parts of the split CRISPR protein can be thought of as the N′ terminal part and the C′ terminal part of the split CRISPR protein. The fusion is typically at the split point of the CRISPR protein. In other words, the C′ terminal of the N′ terminal part of the split CRISPR protein is fused to one of the dimer halves, whilst the N′ terminal of the C′ terminal part is fused to the other dimer half.

[0504] The CRISPR protein does not have to be split in the sense that the break is newly created. The split point is typically designed in silico and cloned into the constructs. Together, the two parts of the split CRISPR protein, the N′ terminal and C′ terminal parts, form a full CRISPR protein, comprising preferably at least 70% or more of the wildtype amino acids (or nucleotides encoding them), preferably at least 80% or more, preferably at least 90% or more, preferably at least 95% or more, and most preferably at least 99% or more of the wildtype amino acids (or nucleotides encoding them). Some trimming may be possible, and mutants are envisaged. Non-functional domains may be removed entirely. What is important is that the two parts may be brought together and that the desired CRISPR protein function is restored or reconstituted.

[0505] The dimer may be a homodimer or a heterodimer.

[0506] One or more, preferably two, NLSs may be used in operable linkage to the first CRISPR protein construct. One or more, preferably two, NESs may be used in operable linkage to the first Cas construct. The NLSs and/or the NESs preferably flank the split Cas-dimer (e.g., half dimer) fusion, i.e., one NLS may be positioned at the N′ terminal of the first CRISPR protein construct and one NLS may be at the C′ terminal of the first CRISPR protein construct. Similarly, one NES may be positioned at the N′ terminal of the second CRISPR construct and one NES may be at the C′ terminal of the second CRISPR construct. Where reference is made to N′ or C′ terminals, it will be appreciated that these correspond to 5′ ad 3′ ends in the corresponding nucleotide sequence.

[0507] A preferred arrangement is that the first CRISPR protein construct is arranged 5′-NLS-(N′ terminal CRISPR protein part)-linker-(first half of the dimer)-NLS-3′. A preferred arrangement is that the second CRISPR protein construct is arranged 5′-NES—(second half of the dimer)-linker-(C′ terminal CRISPR protein part)-NES-3′. A suitable promoter is preferably upstream of each of these constructs. The two constructs may be delivered separately or together.

[0508] In some embodiments, one or all of the NES(s) in operable linkage to the second Cas construct may be swapped out for an NLS. However, this may be typically not preferred and, in other embodiments, the localization signal in operable linkage to the second Cas construct is one or more NES(s).

[0509] It will also be appreciated that the NES may be operably linked to the N′ terminal fragment of the split CRISPR protein and that the NLS may be operably linked to the C′ terminal fragment of the split CRISPR protein. However, the arrangement where the NLS is operably linked to the N′ terminal fragment of the split Cas and that the NES is operably linked to the C′ terminal fragment of the split CRISPR protein may be preferred.

[0510] The NES functions to localize the second CRISPR protein fusion construct outside of the nucleus, at least until the inducer energy source is provided (e.g., at least until an energy source is provided to the inducer to perform its function). The presence of the inducer stimulates dimerization of the two CRISPR protein fusions within the cytoplasm and makes it thermodynamically worthwhile for the dimerized, first and second, CRISPR protein fusions to localize to the nucleus. Without being bound by theory, Applicants believe that the NES sequesters the second CRISPR protein fusion to the cytoplasm (i.e., outside of the nucleus). The NLS on the first CRISPR protein fusion localizes it to the nucleus. In both cases, Applicants use the NES or NLS to shift an equilibrium (the equilibrium of nuclear transport) to a desired direction. The dimerization typically occurs outside of the nucleus (a very small fraction might happen in the nucleus) and the NLSs on the dimerized complex shift the equilibrium of nuclear transport to nuclear localization, so the dimerized and hence reconstituted CRISPR protein enters the nucleus.

[0511] Beneficially, Applicants are able to reconstitute function in the split CRISPR protein. Transient transfection is used to prove the concept and dimerization occurs in the background in the presence of the inducer energy source. No activity is seen with separate fragments of the CRISPR protein. Stable expression through lentiviral delivery is then used to develop this and show that a split CRISPR protein approach can be used.

[0512] This present split CRISPR protein approach is beneficial as it allows the CRISPR protein activity to be inducible, thus allowing for temporal control. Furthermore, different localization sequences may be used (i.e., the NES and NLS as preferred) to reduce background activity from auto-assembled complexes. Tissue specific promoters, for example one for each of the first and second CRISPR protein fusion constructs, may also be used for tissue-specific targeting, thus providing spatial control. Two different tissue specific promoters may be used to exert a finer degree of control if required. The same approach may be used in respect of stage-specific promoters or there may a mixture of stage and tissue specific promoters, where one of the first and second Cas fusion constructs is under the control of (i.e. operably linked to or comprises) a tissue-specific promoter, whilst the other of the first and second Cas fusion constructs is under the control of (i.e. operably linked to or comprises) a stage-specific promoter.

[0513] The inducible CRISPR protein CRISPR-Cas system comprises one or more nuclear localization sequences (NLSs), as described herein, for example as operably linked to the first CRISPR protein fusion construct. These nuclear localization sequences are ideally of sufficient strength to drive accumulation of said first CRISPR protein fusion construct in a detectable amount in the nucleus of a eukaryotic cell. Without wishing to be bound by theory, it is believed that a nuclear localization sequence is not necessary for CRISPR-Cas complex activity in eukaryotes, but that including such sequences enhances activity of the system, especially as to targeting nucleic acid molecules in the nucleus, and assists with the operation of the present 2-part system.

[0514] Equally, the second CRISPR protein fusion construct is operably linked to a nuclear export sequence (NES). Indeed, it may be linked to one or more nuclear export sequences. In other words, the number of export sequences used with the second CRISPR protein fusion construct is preferably 1 or 2 or 3. Typically 2 is preferred, but 1 is enough and so is preferred in some embodiments. Suitable examples of NLS and NES are known in the art. For example, a preferred nuclear export signal (NES) is human protein tyrosine kinase 2. Preferred signals will be species specific.

[0515] Where the FRB and FKBP system are used, the FKBP is preferably flanked by nuclear localization sequences (NLSs). Where the FRB and FKBP system are used, the preferred arrangement is N′ terminal CRISPR protein-FRB-NES:C′ terminal Cas-FKBP-NLS. Thus, the first CRISPR protein fusion construct would comprise the C′ terminal CRISPR protein part and the second CRISPR protein fusion construct would comprise the N′ terminal CRISPR protein part.

[0516] Another beneficial aspect to the present invention is that it may be turned on quickly, i.e. that is has a rapid response. It is believed, without being bound by theory, that CRISPR protein activity can be induced through dimerization of existing (already present) fusion constructs (through contact with the inducer energy source) more rapidly than through the expression (especially translation) of new fusion constructs. As such, the first and second CRISPR protein fusion constructs may be expressed in the target cell ahead of time, i.e. before CRISPR protein activity is required. CRISPR protein activity can then be temporally controlled and then quickly constituted through addition of the inducer energy source, which ideally acts more quickly (to dimerize the heterodimer and thereby provide CRISPR protein activity) than through expression (including induction of transcription) of CRISPR protein delivered by a vector, for example.

[0517] Applicants demonstrate that CRISPR protein can be split into two components, which reconstitute a functional nuclease when brought back together. Employing rapamycin sensitive dimerization domains, Applicants generate a chemically inducible CRISPR protein for temporal control of CRISPR protein-mediated genome editing and transcription modulation. Put another way, Applicants demonstrate that CRISPR protein can be rendered chemically inducible by being split into two fragments and that rapamycin-sensitive dimerization domains may be used for controlled reassembly of the CRISPR protein. Applicants show that the re-assembled CRISPR protein may be used to mediate genome editing (through nuclease/nickase activity) as well as transcription modulation (as a DNA-binding domain, the so-called “dead CRISPR protein”).

[0518] As such, the use of rapamycin-sensitive dimerization domains is preferred. Reassembly of the CRISPR protein is preferred. Reassembly can be determined by restoration of binding activity. Where the CRISPR protein is a nickase or induces a double-strand break, suitable comparison percentages compared to a wildtype are described herein.

[0519] Rapamycin treatments can last 12 days. The dose can be 200 nM. This temporal and/or molar dosage is an example of an appropriate dose for Human embryonic kidney 293FT (HEK293FT) cell lines and this may also be used in other cell lines. This figure can be extrapolated out for therapeutic use in vivo into, for example, mg/kg. However, it is also envisaged that the standard dosage for administering rapamycin to a subject is used here as well. By the “standard dosage”, it is meant the dosage under rapamycin's normal therapeutic use or primary indication (i.e. the dose used when rapamycin is administered for use to prevent organ rejection).

[0520] It is noteworthy that the preferred arrangement of CRISPR protein-FRB/FKBP pieces are separate and inactive until rapamycin-induced dimerization of FRB and FKBP results in reassembly of a functional full-length CRISPR protein nuclease. Thus, it is preferred that first CRISPR protein fusion construct attached to a first half of an inducible heterodimer is delivered separately and/or is localized separately from the second Cas fusion construct attached to a first half of an inducible heterodimer.

[0521] To sequester the CRISPR protein (N)-FRB fragment in the cytoplasm, where it is less likely to dimerize with the nuclear-localized Cas (C)-FKBP fragment, it is preferable to use on CRISPR protein (N)-FRB a single nuclear export sequence (NES) from the human protein tyrosine kinase 2 (CRISPR protein (N)—FRB-NES). In the presence of rapamycin, CRISPR protein (N)—FRB-NES dimerizes with CRISPR protein (C)-FKBP-2×NLS to reconstitute a complete CRISPR protein, which shifts the balance of nuclear trafficking toward nuclear import and allows DNA targeting.

[0522] In some aspects or embodiments, an inducible system for providing a CRISPR protein may be used. In some embodiments, the CRISPR protein is capable, in the presence of an inducer energy source, of forming a CRISPR complex with a target sequence and polynucleotides engineered to complex with the CRISPR protein and the target sequence. In some embodiments, the inducible system comprises: a first fusion protein, or polynucleotides encoding it; and a second fusion protein, or polynucleotides encoding it. In some embodiments, the first fusion protein comprises a first portion of the CRISPR protein, a first half of an inducible dimer and one or more Nuclear Localization Sequences (NLS); and the second fusion protein comprises a second portion of the CRISPR protein, a second half of the inducible dimer and one or more Nuclear Export Sequences (NES). In some embodiments, contact with the inducer energy source brings the first and second portions of the inducible dimer together, so as to bring the first and second portions of the CRISPR protein together, such that the CRISPR protein is thereby capable of forming the CRISPR complex. In some embodiments, the CRISPR protein or the CRISPR system is inducible. In some embodiments, the CRISPR protein may be provided as a single ‘part.’ In some embodiments, delivery of the CRISPR protein is in protein (including in RNP complex with the polynucleotides) or in nucleotide form (including in mRNA form). In some embodiments, polynucleotides encoding the first fusion protein and polynucleotides encoding second fusion protein are provided on same or different constructs. WO2015/089427 describes an inducible CRISPR-Cas system based on an inducible dimer, which can be a homodimer or heterodimer. The system is also described in Zetsche et al. (Nature Biotechnology 33: 139-142 (2015) DOI: doi:10.1038/nbt.3149). Basically, the CRISPR effector protein is split into two parts, each of which is fused to one half of an inducible dimer, whereby contact with an inducer energy source brings the first and second halves of the inducible dimer together, and bringing the first and second halves of the inducible dimer together allows the first and second CRISPR effector fusion constructs to constitute a functional CRISPR-Cas system, wherein the CRISPR-Cas system comprises a guide RNA (gRNA) comprising a guide sequence capable of hybridizing to a target sequence in a genomic locus of interest in a cell, and wherein the functional CRISPR-Cas system binds to the genomic locus. In particular embodiments, the functional CRISPR-Cas system edits the genomic locus to alter gene expression. In particular embodiments the first half is an FKBP and the second half is an FRB. An inducer energy source may be considered to be simply an inducer or a dimerizing agent as it acts to reconstitute the CRISPR effector protein.

[0523] Examples of inducers include light and hormones. A preferred example of first and second light-inducible dimer halves is the CIB1 and CRY2 system. The CIB1 domain is a heterodimeric binding partner of the light-sensitive Cryptochrome 2 (CRY2). In another example, the blue light-responsive Magnet dimerization system (pMag and nMag) may be fused to the two parts of a split Cas protein. In response to light stimulation, pMag and nMag dimerize and Cas reassembles. For example, such system is described in connection with Cas9 in Nihongaki et al. (Nat. Biotechnol. 33, 755-790, 2015). The inducer energy source may be heat, ultrasound, electromagnetic energy or chemical. In a preferred embodiment the inducer energy source may be an antibiotic, a small molecule, a hormone, a hormone derivative, a steroid or a steroid derivative. In a more preferred embodiment, the inducer energy source maybe abscisic acid (ABA), doxycycline (DOX), cumate, rapamycin, 4-hydroxytamoxifen (4OHT), estrogen or ecdysone. The at least one switch may be selected from the group consisting of antibiotic based inducible systems, electromagnetic energy based inducible systems, small molecule based inducible systems, nuclear receptor based inducible systems and hormone based inducible systems. In a more preferred embodiment the at least one switch may be selected from the group consisting of tetracycline (Tet)/DOX inducible systems, light inducible systems, ABA inducible systems, cumate repressor/operator systems, 4OHT/estrogen inducible systems, ecdysone-based inducible systems and FKBP12/FRAP (FKBP12-rapamycin complex) inducible systems. Such inducers are also discussed herein and in PCT/US2013/051418, incorporated herein by reference.

[0524] Also, it is described in WO2015/089427 that the half of an inducible dimer can be linked to the effector protein with a linker. Optionally, the CRISPR effector protein has reduced or no nuclease activity, e.g. contains one or more inactivating mutations. Further it is described that one or more functional domains can be associated with one or both parts of the effector protein, WO2015/089427 identifies split points within SpCas9. Similar suitable split points can be identified for Cas.

[0525] The following table presents non-limiting potential split regions within As and LbCpf1. A split site within such a region may be opportune.

TABLE 10

| Split region | AsCpf1 | LbCpf1 |
|---|---|---|
| 1 | 575-588 | 566-571 |
| 2 | 631-645 | 754-757 |
| 3 | 653-664 | — |
| 4 | 818-844 | — |

[0526] For Fn, As and Lb Cpf1 mutants, it should be readily apparent what the corresponding position for a potential split site is, for example, based on a sequence alignment. For non-Fn, As and Lb enzymes one can use the crystal structure of an ortholog if a relatively high degree of homology exists between the ortholog and the intended Cpf1, or one can use computational prediction.

[0527] Further it is described that the first and second fusion constructs of the CRISPR effector protein can be delivered in the same or separate vectors. In particular embodiments, a first half of the inducible dimer is fused to one or more nuclear localization constructs while the second half is fused to one or more nuclear export signals.

[0528] The therapeutic methods which involve the use of the inducible dimer comprise the step of administering the vectors comprising the first and second fusion constructs to the subject and administering an inducer energy source to the subject. In particular embodiments, the inducer energy source is rapamycin. It is further envisaged that the methods can involve administering, a repair template, in the same or a different vector as the inducible dimer fragments. An exemplary treatment regimen with Rapamycin can last 12 days.

[0529] The use of the split Cas effector protein system described herein allows a further control of the CRISPR-Cas activity. More particularly the use of an inducible system allows for temporal control. In addition, the use of different localization sequences (i.e., the NES and NLS as preferred) can reduce background activity from auto-assembled complexes. Tissue specific promoters, allow for spatial control. Two different tissue specific promoters may be used to exert a finer degree of control if required.

g. Use of Self-Inactivating Systems

[0530] Once all copies of a gene in the genome of a cell have been edited, continued CRISPR/Cas expression in that cell is no longer necessary. Indeed, sustained expression is undesirable to avoid off-target effects and other toxicity issues. WO 2015089351 describes self-Inactivating CRISPR systems which rely on the use of a non-coding guide target sequence within the CRISPR vector itself. Thus, after expression begins, the CRISPR system will lead to its own destruction, but before destruction is complete it will have time to edit the genomic copies of the target gene (which, with a normal point mutation in a diploid cell, requires at most two edits). Accordingly, the methods may involve the use of a self-inactivating CRISPR-Cas system which includes one additional RNA (i.e., guide RNA) that targets the coding sequence for the CRISPR enzyme itself or that targets one or more non-coding guide target sequences complementary to unique sequences present in within the promoter driving expression of the non-coding RNA elements, within the promoter driving expression of the Cas gene, within 100 bp of the ATG translational start codon in the Cas coding sequence, or within the inverted terminal repeat (iTR) of a viral delivery vector, e.g., in the AAV genome.

[0531] Similarly, self-inactivating systems which make use of “governing guides” are exemplified in relation to Cas9 in US2015232881A1 (also published as WO2015070083 (A1) referenced elsewhere herein and incorporated herein by reference, and may be extrapolated to Cas. More particularly Methods and compositions that use, or include, a nucleic acid, e.g., a DNA, that encodes a Cas molecule or a gRNA molecule, can, in addition, use or include a “governing gRNA molecule.” The governing gRNA molecule can complex with the Cpf1 molecule to inactivate or silence a component of a CRISPR-Cas system. The additional gRNA molecule, referred to herein as a governing gRNA molecule, comprises a targeting domain which targets a component of the CRISPR-Cas system. In an embodiment, the governing gRNA molecule targets and silences (1) a nucleic acid that encodes a Cas molecule), (2) a nucleic acid that encodes a gRNA molecule (i.e., a gRNA-targeting gRNA molecule), or (3) a nucleic acid sequence engineered into the Cas components that is designed with minimal homology to other nucleic acid sequences in the cell to minimize off-target cleavage (i.e., an engineered control sequence-targeting gRNA molecule).

[0532] The targeting sequence for the governing gRNA can be selected to increase regulation or control of the Cas system and/or to reduce or minimize off-target effects of the system. For example, a governing gRNA can minimize undesirable cleavage, e.g., “recleavage” after Cas mediated alteration of a target nucleic acid or off-target cutting of Cas, by inactivating (e.g., cleaving) a nucleic acid that encodes a Cas molecule. In an embodiment, a governing gRNA places temporal or other limit(s) on the level of expression or activity of the Cas molecule/gRNA molecule complex. In an embodiment, the governing gRNA reduces off-target or other unwanted activity.

[0533] The additional guide RNA can be delivered via a vector, e.g., a separate vector or the same vector that is encoding the CRISPR complex. When provided by a separate vector, the CRISPR RNA that targets Cas expression can be administered sequentially or simultaneously. When administered sequentially, the CRISPR RNA that targets Cas expression is to be delivered after the CRISPR RNA that is intended for e.g. gene editing or gene engineering. This period may be a period of minutes (e.g. 5 minutes, 10 minutes, 20 minutes, 30 minutes, 45 minutes, 60 minutes). This period may be a period of hours (e.g. 2 hours, 4 hours, 6 hours, 8 hours, 12 hours, 24 hours). This period may be a period of days (e.g. 2 days, 3 days, 4 days, 7 days). This period may be a period of weeks (e.g. 2 weeks, 3 weeks, 4 weeks). This period may be a period of months (e.g. 2 months, 4 months, 8 months, 12 months). This period may be a period of years (2 years, 3 years, 4 years). In this fashion, the Cas enzyme associates with a first gRNA capable of hybridizing to a first target, such as a genomic locus or loci of interest and undertakes the function(s) desired of the CRISPR-Cas system (e.g., gene engineering); and subsequently the Cas 1 enzyme may then associate with the second gRNA capable of hybridizing to the sequence comprising at least part of the Cas or CRISPR cassette. Where the gRNA targets the sequences encoding expression of the Cas protein, the enzyme becomes impeded and the system becomes self-inactivating. In the same manner, CRISPR RNA that targets Cas expression applied via, for example liposome, lipofection, nanoparticles, microvesicles as explained herein, may be administered sequentially or simultaneously. Similarly, self-inactivation may be used for inactivation of one or more guide RNA used to target one or more targets.

[0534] In some embodiments, a single gRNA is provided that is capable of hybridization to a sequence downstream of a CRISPR enzyme start codon, whereby after a period of time there is a loss of the CRISPR enzyme expression. In some embodiments, one or more gRNA(s) are provided that are capable of hybridization to one or more coding or non-coding regions of the polynucleotide encoding the CRISPR-Cas system, whereby after a period of time there is a inactivation of one or more, or in some cases all, of the CRISPR-Cas systems. In some aspects of the system, and not to be limited by theory, the cell may comprise a plurality of CRISPR-Cas complexes, wherein a first subset of CRISPR complexes comprise a first chiRNA capable of targeting a genomic locus or loci to be edited, and a second subset of CRISPR complexes comprise at least one second chiRNA capable of targeting the polynucleotide encoding the CRISPR-Cas system, wherein the first subset of CRISPR-Cas complexes mediate editing of the targeted genomic locus or loci and the second subset of CRISPR complexes eventually inactivate the CRISPR-Cas system, thereby inactivating further CRISPR-Cas expression in the cell.

[0535] Thus the invention provides a CRISPR-Cas system comprising one or more vectors for delivery to a eukaryotic cell, wherein the vector(s) encode(s): (i) a CRISPR enzyme; (ii) a first guide RNA capable of hybridizing to a target sequence in the cell; (iii) a second guide RNA capable of hybridizing to one or more target sequence(s) in the vector which encodes the CRISPR enzyme; (iv) at least one tracr mate sequence; and (v) at least one tracr sequence, The first and second complexes can use the same tracr and tracr mate, thus differing only by the guide sequence, wherein, when expressed within the cell: the first guide RNA directs sequence-specific binding of a first CRISPR complex to the target sequence in the cell; the second guide RNA directs sequence-specific binding of a second CRISPR complex to the target sequence in the vector which encodes the CRISPR enzyme; the CRISPR complexes comprise (a) a tracr mate sequence hybridized to a tracr sequence and (b) a CRISPR enzyme bound to a guide RNA, such that a guide RNA can hybridize to its target sequence; and the second CRISPR complex inactivates the CRISPR-Cas system to prevent continued expression of the CRISPR enzyme by the cell. The CRISPR enzyme can be Cpf1, particularly FnCpf1 or AsCpf1.

[0536] Further characteristics of the vector(s), the encoded enzyme, the guide sequences, etc. are disclosed elsewhere herein. For instance, one or both of the guide sequence(s) can be part of a chiRNA sequence which provides the guide, tracr mate and tracr sequences within a single RNA, such that the system can encode (i) a CRISPR enzyme; (ii) a first chiRNA comprising a sequence capable of hybridizing to a first target sequence in the cell, a first tracr mate sequence, and a first tracr sequence; (iii) a second guide RNA capable of hybridizing to the vector which encodes the CRISPR enzyme, a second tracr mate sequence, and a second tracr sequence. Similarly, the enzyme can include one or more NLS, etc.

[0537] The various coding sequences (CRISPR enzyme, guide RNAs, tracr and tracr mate) can be included on a single vector or on multiple vectors. For instance, it is possible to encode the enzyme on one vector and the various RNA sequences on another vector, or to encode the enzyme and one chiRNA on one vector, and the remaining chiRNA on another vector, or any other permutation. In general, a system using a total of one or two different vectors is preferred.

[0538] Where multiple vectors are used, it is possible to deliver them in unequal numbers, and ideally with an excess of a vector which encodes the first guide RNA relative to the second guide RNA, thereby assisting in delaying final inactivation of the CRISPR system until genome editing has had a chance to occur.

[0539] Thus the target sequence in the vector must be capable of inactivating expression of the CRISPR effector protein. Suitable target sequences can be, for instance, near to or within the translational start codon for the Cas coding sequence, in a non-coding sequence in the promoter driving expression of the non-coding RNA elements, within the promoter driving expression of the Cas gene, within 100 bp of the ATG translational start codon in the Cas coding sequence, and/or within the inverted terminal repeat (iTR) of a viral delivery vector, e.g., in the AAV genome. A double stranded break near this region can induce a frame shift in the Cas coding sequence, causing a loss of protein expression. An alternative target sequence for the “self-inactivating” guide RNA would aim to edit/inactivate regulatory regions/sequences needed for the expression of the CRISPR-Cas system or for the stability of the vector. For instance, if the promoter for the Cas coding sequence is disrupted then transcription can be inhibited or prevented. Similarly, if a vector includes sequences for replication, maintenance or stability then it is possible to target these. For instance, in a AAV vector a useful target sequence is within the iTR. Other useful sequences to target can be promoter sequences, polyadenylation sites, etc.

[0540] Furthermore, if the guide RNAs are expressed in array format, the “self-inactivating” guide RNAs that target both promoters simultaneously will result in the excision of the intervening nucleotides from within the CRISPR-Cas expression construct, effectively leading to its complete inactivation. Similarly, excision of the intervening nucleotides will result where the guide RNAs target both ITRs, or targets two or more other CRISPR-Cas components simultaneously. Self-inactivation as explained herein is applicable, in general, with CRISPR-Cas systems in order to provide regulation of the CRISPR-Cas. For example, self-inactivation as explained herein may be applied to the CRISPR repair of mutations, for example expansion disorders, as explained herein. As a result of this self-inactivation, CRISPR repair is only transiently active.

[0541] Addition of non-targeting nucleotides to the 5′ end (e.g. 1-10 nucleotides, preferably 1-5 nucleotides) of the “self-inactivating” guide RNA can be used to delay its processing and/or modify its efficiency as a means of ensuring editing at the targeted genomic locus prior to CRISPR-Cas shutdown.

[0542] In one aspect of the self-inactivating AAV-CRISPR-Cas system, plasmids that co-express one or more sgRNA targeting genomic sequences of interest (e.g. 1-2, 1-5, 1-10, 1-15, 1-20, 1-30) may be established with “self-inactivating” sgRNAs that target a Cas sequence at or near the engineered ATG start site (e.g. within 5 nucleotides, within 15 nucleotides, within 30 nucleotides, within 50 nucleotides, within 100 nucleotides). A regulatory sequence in the U6 promoter region can also be targeted with an sgRNA. The U6-driven sgRNAs may be designed in an array format such that multiple sgRNA sequences can be simultaneously released. When first delivered into target tissue/cells (left cell) sgRNAs begin to accumulate while Cas 1 protein levels rise in the nucleus. Cas complexes with all of the sgRNAs to mediate genome editing and self-inactivation of the CRISPR-Cas plasmids.

[0543] One aspect of a self-inactivating CRISPR-Cas system is expression of singly or in tandem array format from 1 up to 4 or more different guide sequences; e.g. up to about 20 or about 30 guides sequences. Each individual self-inactivating guide sequence may target a different target. Such may be processed from, e.g. one chimeric pol3 transcript. Pol3 promoters such as U6 or H1 promoters may be used. Pol2 promoters such as those mentioned throughout herein. Inverted terminal repeat (iTR) sequences may flank the Pol3 promoter-sgRNA(s)-Pol2 promoter-Cas9.

[0544] In particular embodiments one or more guide(s) edit the one or more target(s) while one or more self-inactivating guides inactivate the CRISPR/Cas system. Thus, for example, the described CRISPR-Cas system for repairing expansion disorders may be directly combined with the self-inactivating CRISPR-Cas system described herein. Such a system may, for example, have two guides directed to the target region for repair as well as at least a third guide directed to self-inactivation of the CRISPR-Cas. Reference is made to Application Ser. No. PCT/US2014/069897, entitled “Compositions And Methods Of Use Of Crispr-Cas Systems In Nucleotide Repeat Disorders,” published Dec. 12, 2014 as WO/2015/089351.

[0545] In particular embodiments, the gene editing systems described herein are placed under the control of a passcode kill switch, which is a mechanism which efficiently kills the host cell when the conditions of the cell are altered. This is ensured by introducing hybrid LacI-GalR family transcription factors, which require the presence of IPTG to be switched on (Chan et al. 2015 Nature Chemical Biology doi:10.1038/nchembio.1979 which can be used to drive a gene encoding an enzyme critical for cell-survival. By combining different transcription factors sensitive to different chemicals, a “code” can be generated. This system can be used to spatially and temporally control the extent of CRISPR-induced genetic modifications, which can be of interest in different fields including therapeutic applications and may also be of interest to avoid the “escape” of GMOs from their intended environment.

h. Use of “Off-Switches”

[0546] In particular embodiments, it may be possible to make use of specific inhibitors and/or agonist of Cas. Off-switches and On-switches may be any molecules (i.e. peptides, proteins, small molecules, nucleic acids) capable of interfering with or acting as an agonist for any aspect of the Cas9 effector protein. For instance, Pawluck et al. 2016 (Cell 167, 1-10) describe mobile elements from bacteria that encode protein inhibitors of Cas9. Three families of anti-CRISPRs were found to inhibit N. meningitidis Cas9 in vivo and in vitro. The anti-CRISPRs bind directly to NmeCas9. These proteins are described to be potent “off-switches” for NmeCas9 genome editing in human cells. Methods for identifying small molecules which affect efficiency of Cas9 are described for example by Yu et al. (Cell Stem Cell 16, 142-147, 2015). In certain embodiments small molecules may be used for control Cas9. Maji et al. describe a small molecule-regulated protein degron domain to control Cas9 system editing. Maji et al. “Multidimensional chemical control of CRISPR-Cas9” Nature Chemical Biology (2017) 13:9-12. In certain example embodiments, the inhibitor may be a bacteriophage derived protein. See Rauch et al. “Inhibition of CRISPR-Cas9 with Bacteriophage Proteins” Cell (2017) 168(2):150-158. In certain example embodiments, the anti-CRISPR may inhibit CRISPR-Cas systems by binding to guide molecules. See Shin et al. “Disabling Cas9 by an anti-CRISPR DNA mimic” bioRxiv, Apr. 22, 2017, doi: dx.doi.org/10.1101/129627.

[0547] In particular embodiments, intracellular DNA is removed by genetically encoded DNai which responds to a transcriptional input and degrades user-defined DNA as described in Caliando & Voigt, Nature Communications 6: 6989 (2015).

### Efficacy

[0548] a. Enzyme Stability

[0549] The level of expression of a protein is dependent on many factors, including the quantity of mRNA, its stability and rates of ribosome initiation. The stability or degradation of mRNA is an important factor. Several strategies have been described to increase mRNA stability. One aspect is codon-optimization. It has been found that GC-rich genes are expressed several-fold to over a 100-fold more efficiently than their GC-poor counterparts. This effect could be directly attributed to increased steady-state mRNA levels, and more particularly to efficient transcription or mRNA processing (not decreased degradation) (Kudla et al. Plos Biology dx.doi.org/10.1371/journal.pbio.0040180). Also, it has been found that ribosomal density has a significant effect on the transcript half-life. More particularly, it was found that an increase in stability can be achieved through the incorporation of nucleotide sequences that are capable of forming secondary structures, which often recruit ribosomes, which impede mRNA degrading enzymes. WO2011/141027 describes that slowly-read codons can be positioned in such a way as to cause high ribosome occupancy across a critical region of the 5′ end of the mRNA can increase the half-life of a message by as much as 25%, and produce a similar uplift in protein production. In contrast, positioning even a single slow-read codon before this critical region can significantly destabilize the mRNA and result in an attenuation of protein expression. This understanding enables the design of mRNAs so as to suit the desired functionality. In addition, chemical modifications such as those described for guide sequences herein can be envisaged to increase mRNA stability.

b. Guide Stability

[0550] In certain embodiments, the methods make use of chemically modified guide RNAs. Examples of guide RNA chemical modifications include, without limitation, incorporation of 2′-O-methyl (M), 2′-O-methyl 3′phosphorothioate (MS), or 2′-O-methyl 3′thioPACE (MSP) at one or more terminal nucleotides. Such chemically modified guide RNAs can comprise increased stability and increased activity as compared to unmodified guide RNAs, though on-target vs. off-target specificity is not predictable. (See, Hendel, 2015, Nat Biotechnol. 33(9):985-9, doi: 10.1038/nbt.3290, published online 29 Jun. 2015). Chemically modified guide RNAs father include, without limitation, RNAs with phosphorothioate linkages and locked nucleic acid (LNA) nucleotides comprising a methylene bridge between the 2′ and 4′ carbons of the ribose ring.

### Selection of Target Sites in Gene

[0551] a) Selection within a Target Gene

[0552] Studies to date suggest that while sgRNA activity can be quite high, there is significant variability among sgRNAs in their ability to generate the desired target cleavage. Efforts have been made to identify design criteria to maximize guide RNA efficacy. Doench et al. (Nat Biotechnol. 2014 December; 32(12): 1262-1267 and Nat Biotechnol. PubMed PMID: 26780180) describe the development of a quantitative model to optimize sgRNA activity prediction, and a tool to use this model for sgRNA design. Accordingly, in particular embodiments, the methods provided herein comprise identifying an optimal guide sequence based on a statistical comparison of active guide RNAs, such as described by Doench et al. (above). In particular embodiments, at least five gRNAs are designed per target and these are tested empirically in cells to generate at least one which has sufficiently high activity.

### b) Identification of Suitable Guide Sequence

[0553] Currently RNA guides are designed using the reference human genome; however, failing to take into account variation in the human population may confound the therapeutic outcome for a given RNA guide. The recently released ExAC dataset, based on 60,706 individuals, contains on average one variant per eight nucleotides in the human exome (Lek, M. et al. Analysis of protein-coding genetic variation in 60,706 humans. Nature 536, 285-291 (2016)). This highlights the potential for genetic variation to impact the efficacy of certain RNA guides across patient populations for CRISPR-based gene therapy, due to the presence of mismatches between the RNA guide and variants present in the target site of specific patients. To assess this impact, we use the ExAC dataset to catalog variants present in all possible targets in the human reference exome that either (i) disrupt the target PAM sequence or (ii) introduce mismatches between the RNA guide and the genomic DNA, which can collectively be termed target variation. For treatment of a patient population, avoiding target variation for RNA guides administered to individual patients will maximize the consistency of outcomes for a genome editing therapeutic. The demonstration of the impact of target variation is illustrated in the examples section herein.

[0554] Ideally, personalized genomic medicine would tailor RNA-guided endonuclease therapeutics for each patient. However, it would likely be cost-prohibitive and infeasible from a regulatory standpoint to design an individual RNA guide for each patient receiving a genome editing therapy. The analysis of the impact of genetic variation on the efficacy and safety of RNA-guided endonucleases motivates the following framework to streamline the design and testing of genome editing therapeutics. First, use of RNA guides for platinum targets would ensure perfect targeting for 99.99% of patients. Second, these RNA guides need to be further selected to minimize the number of off-target candidates occurring on high frequency haplotypes in the patient population. Third, low frequency variation captured in large scale sequencing datasets can be used to estimate the number of guide RNA-enzyme combinations required to effectively and safely treat different sizes of patient populations. Growth of large scale sequencing datasets will improve the accuracy of these estimates. Fourth, pre-therapeutic whole genome sequencing of individual patients will be needed to select a single approved guide RNA-enzyme combination for treatment. This combination should be a perfect match to the patient's genome and be free of patient-specific off-target candidates. This framework, in combination with rapidly accumulating human sequencing data, which will further refine these selection criteria, will enable the design and validation of genome editing therapeutics minimizing both the number of guide RNA-enzyme combinations necessary for approval and the cost of delivering effective and safe gene therapies to patients.

[0555] Accordingly, in particular embodiments, the methods provided herein comprise one or more of the following steps: (1) identifying platinum targets, (2) selection of the guides to minimize the number of off-target candidates occurring on high frequency haplotypes in the patient population; (3) select guide (and/or effector protein) based low frequency variation captured in large scale sequencing datasets to estimate the number of guide RNA-enzyme combinations required to effectively and safely treat different sizes of patient populations, and (4) confirm or select guide based on pre-therapeutic whole genome sequencing of individual patient. In particular embodiments, a “platinum” target is one that does not contain variants occurring at ≥0.01% allele frequency.

### Effector Protein Functioning as Target-Binding Protein

### Effector Protein Lacking Nuclease Activity

[0556] As described herein, corresponding catalytic domains of a Cas effector protein may also be mutated to produce a mutated Cas effector protein lacking all DNA cleavage activity or having substantially reduced DNA cleavage activity. In some embodiments, a nucleic acid-targeting effector protein may be considered to substantially lack all RNA cleavage activity when the RNA cleavage activity of the mutated enzyme is about no more than 25%, 10%, 5%, 1%, 0.1%, 0.01%, or less of the nucleic acid cleavage activity of the non-mutated form of the enzyme; an example can be when the nucleic acid cleavage activity of the mutated form is nil or negligible as compared with the non-mutated form. An effector protein may be identified with reference to the general class of enzymes that share homology to the biggest nuclease with multiple nuclease domains from the Type V/Type VI CRISPR system. Most preferably, the effector protein is Cas. In further embodiments, the effector protein is a Type V protein. By derived, Applicants mean that the derived enzyme is largely based, in the sense of having a high degree of sequence homology with, a wildtype enzyme, but that it has been mutated (modified) in some way as known in the art or as described herein.

[0557] In particular embodiments the Cas effector protein comprise one or more heterologous functional domains. The one or more heterologous functional domains may comprise one or more nuclear localization signal (NLS) domains. The one or more heterologous functional domains may comprise at least two or more NLSs. The one or more heterologous functional domains may comprise one or more transcriptional activation domains. A transcriptional activation domain may comprise VP64. The one or more heterologous functional domains may comprise one or more transcriptional repression domains. A transcriptional repression domain may comprise a KRAB domain or a SID domain. The one or more heterologous functional domain may comprise one or more nuclease domains. The one or more nuclease domains may comprise Fok1.

[0558] For the purposes of the following discussion, reference to a functional domain could be a functional domain associated with the CRISPR enzyme or a functional domain associated with the adaptor protein.

[0559] In the practice of the invention and as will be described below, loops of the gRNA may be extended, without colliding with the Cas (e.g. Cpf1) protein by the insertion of distinct RNA loop(s) or distinct sequence(s) that may recruit adaptor proteins that can bind to the distinct RNA loop(s) or distinct sequence(s). The adaptor proteins may include but are not limited to orthogonal RNA-binding protein/aptamer combinations that exist within the diversity of bacteriophage coat proteins. A list of such coat proteins includes, but is not limited to: QP, F2, GA, fr, JP501, M12, R17, BZ13, JP34, JP500, KU1, M11, MX1, TW18, VK, SP, FI, ID2, NL95, TW19, AP205, ϕCb5, ϕCb8r, ϕCb12r, ϕCb23r, 7s and PRR1. These adaptor proteins or orthogonal RNA binding proteins can further recruit effector proteins or fusions which comprise one or more functional domains. In some embodiments, the functional domain may be selected from the group consisting of: transposase domain, integrase domain, recombinase domain, resolvase domain, invertase domain, protease domain, DNA methyltransferase domain, DNA hydroxylmethylase domain, DNA demethylase domain, histone acetylase domain, histone deacetylases domain, nuclease domain, repressor domain, activator domain, nuclear-localization signal domains, transcription-regulatory protein (or transcription complex recruiting) domain, cellular uptake activity associated domain, nucleic acid binding domain, antibody presentation domain, histone modifying enzymes, recruiter of histone modifying enzymes; inhibitor of histone modifying enzymes, histone methyltransferase, histone demethylase, histone kinase, histone phosphatase, histone ribosylase, histone deribosylase, histone ubiquitinase, histone deubiquitinase, histone biotinase and histone tail protease. In some preferred embodiments, the functional domain is a transcriptional activation domain, such as, without limitation, VP64, p65, MyoD1, HSF1, RTA, SET7/9 or a histone acetyltransferase. In some embodiments, the functional domain is a transcription repression domain, preferably KRAB. In some embodiments, the transcription repression domain is SID, or concatemers of SID (eg SID4X). In some embodiments, the functional domain is an epigenetic modifying domain, such that an epigenetic modifying enzyme is provided. In some embodiments, the functional domain is an activation domain, which may be the P65 activation domain. In some embodiments, the functional domain is a deaminase, such as a cytidine deaminase. Cytidine deaminase may be directed to a target nucleic acid to where it directs conversion of cytidine to uridine, resulting in C to T substitutions (G to A on the complementary strand). In such an embodiment, nucleotide substitutions can be affected without DNA cleavage.

### Guide RNAs Comprising a Dead Guide Sequence

[0560] In one aspect, the invention provides guide sequences which are modified in a manner which allows for formation of the CRISPR complex and successful binding to the target, while at the same time, not allowing for successful nuclease activity (i.e. without nuclease activity/without indel activity). For matters of explanation such modified guide sequences are referred to as “dead guides” or “dead guide sequences”. These dead guides or dead guide sequences can be thought of as catalytically inactive or conformationally inactive with regard to nuclease activity. Nuclease activity may be measured using surveyor analysis or deep sequencing as commonly used in the art, preferably surveyor analysis. Similarly, dead guide sequences may not sufficiently engage in productive base pairing with respect to the ability to promote catalytic activity or to distinguish on-target and off-target binding activity.

[0561] The ability of a dead guide sequence to direct sequence-specific binding of a CRISPR complex to a target sequence may be assessed by any suitable assay. For example, the components of a CRISPR system sufficient to form a CRISPR complex, including the dead guide sequence to be tested, may be provided to a host cell having the corresponding target sequence, such as by transfection with vectors encoding the components of the CRISPR sequence, followed by an assessment of preferential cleavage within the target sequence, such as by Surveyor assay as described herein. Similarly, cleavage of a target polynucleotide sequence may be evaluated in a test tube by providing the target sequence, components of a CRISPR complex, including the dead guide sequence to be tested and a control guide sequence different from the test dead guide sequence, and comparing binding or rate of cleavage at the target sequence between the test and control guide sequence reactions. Other assays are possible, and will occur to those skilled in the art. A dead guide sequence may be selected to target any target sequence. In some embodiments, the target sequence is a sequence within a genome of a cell.

[0562] Several structural parameters allow for a proper framework to arrive at such dead guides. As known in the art, one aspect of gRNA—CRISPR effector protein specificity is the direct repeat sequence, which is to be appropriately linked to such guides. In particular, this implies that the direct repeat sequences are designed dependent on the origin of the CRISPR effector protein. Thus, structural data available for validated dead guide sequences may be used for designing Cas specific equivalents. Structural similarity between, e.g., the orthologous nuclease domains RuvC of two or more Cas effector proteins may be used to transfer design equivalent dead guides. In particular embodiments, the dead guide sequences are shorter than respective guide sequences which result in active Cas-specific indel formation. Dead guides are 5%, 10%, 20%, 30%, 40%, 50%, shorter than respective guides directed to the same Cas leading to active Cas-specific indel formation.

[0563] The use of dead guides in the context herein as well as the state of the art provides a surprising and unexpected platform for network biology and/or systems biology in both in vitro, ex vivo, and in vivo applications, allowing for multiplex gene targeting, and in particular bidirectional multiplex gene targeting. Prior to the use of dead guides, addressing multiple targets, for example for activation, repression and/or silencing of gene activity, has been challenging and in some cases not possible. With the use of dead guides, multiple targets, and thus multiple activities, may be addressed, for example, in the same cell, in the same animal, or in the same patient. Such multiplexing may occur at the same time or staggered for a desired timeframe.

[0564] For example, the dead guides now allow for the first time to use gRNA as a means for gene targeting, without the consequence of nuclease activity, while at the same time providing directed means for activation or repression. Guide RNA comprising a dead guide may be modified to further include elements in a manner which allow for activation or repression of gene activity, in particular protein adaptors (e.g. aptamers) as described herein elsewhere allowing for functional placement of gene effectors (e.g. activators or repressors of gene activity). One example is the incorporation of aptamers, as explained herein and in the state of the art. By engineering the gRNA comprising a dead guide to incorporate protein-interacting aptamers (Konermann et al., “Genome-scale transcription activation by an engineered CRISPR-Cas9 complex,” doi:10.1038/nature14136, incorporated herein by reference), one may assemble a synthetic transcription activation complex consisting of multiple distinct effector domains. Such may be modeled after natural transcription activation processes. For example, an aptamer, which selectively binds an effector (e.g. an activator or repressor; dimerized MS2 bacteriophage coat proteins as fusion proteins with an activator or repressor), or a protein which itself binds an effector (e.g. activator or repressor) may be appended to a dead gRNA tetraloop and/or a stem-loop 2. In the case of MS2, the fusion protein MS2-VP64 binds to the tetraloop and/or stem-loop 2 and in turn mediates transcriptional up-regulation, for example for Neurog2. Other transcriptional activators are, for example, VP64. P65, HSF1, and MyoD1. By mere example of this concept, replacement of the MS2 stem-loops with PP7-interacting stem-loops may be used to recruit repressive elements.

[0565] Accordingly, in particular embodiments of the methods provided herein, use is made of a dead guide, wherein the gRNA further comprises modifications which provide for gene activation or repression, as described herein. The dead gRNA may comprise one or more aptamers. The aptamers may be specific to gene effectors, gene activators or gene repressors. Alternatively, the aptamers may be specific to a protein which in turn is specific to and recruits/binds a specific gene effector, gene activator or gene repressor. If there are multiple sites for activator or repressor recruitment, it is preferred that the sites are specific to either activators or repressors. If there are multiple sites for activator or repressor binding, the sites may be specific to the same activators or same repressors. The sites may also be specific to different activators or different repressors. The gene effectors, gene activators, gene repressors may be present in the form of fusion proteins.

[0566] In particular embodiments, the dead gRNA includes a non-naturally occurring or engineered composition comprising two or more adaptor proteins, wherein each protein is associated with one or more functional domains and wherein the adaptor protein binds to the distinct RNA sequence(s) inserted into the at least one loop of the dead gRNA. In certain embodiments, the adaptor protein is a fusion protein comprising the functional domain, the fusion protein optionally comprising a linker between the adaptor protein and the functional domain, the linker optionally including a GlySer linker. In certain embodiments, the one or more functional domains associated with the adaptor protein are selected from: transcriptional activation domains and transcriptional repressor domains. In certain embodiments, the one or more functional domains associated with the adaptor protein are selected from: VP64, p65, MyoD1, HSF1, RTA or SET7/9, KRAB domain, NuE domain, NcoR domain, SID domain or a SID4X domain. In certain embodiments, at least one of the one or more functional domains associated with the adaptor protein have one or more activities comprising methylase activity, demethylase activity, transcription activation activity, transcription repression activity, transcription release factor activity, histone modification activity, DNA integration activity RNA cleavage activity, DNA cleavage activity or nucleic acid binding activity. In certain embodiments, the DNA cleavage activity is due to a Fok1 nuclease. In certain embodiments, the dead gRNA is modified so that, after dead gRNA binds the adaptor protein and further binds to the Cas and target, the functional domain is in a spatial orientation allowing for the functional domain to function in its attributed function. In certain embodiments, the at least one loop of the dead gRNA is tetra loop and/or loop2. In certain embodiments, the tetra loop and loop 2 of the dead gRNA are modified by the insertion of the distinct RNA sequence(s). In certain embodiments, the insertion of distinct RNA sequence(s) that bind to one or more adaptor proteins is an aptamer sequence. In certain embodiments, the aptamer sequence is two or more aptamer sequences specific to the same adaptor protein. In certain embodiments, the aptamer sequence is two or more aptamer sequences specific to different adaptor protein. In certain embodiments, the adaptor protein comprises MS2, PP7, Qβ, F2, GA, fr, JP501, M12, R17, BZ13, JP34, JP500, KU1, M11, MX1, TW18, VK, SP, FI, ID2, NL95, TW19, AP205, ϕCb5, ϕCb8r, ϕCb12r, ϕCb23r, 7s, PRR1. In certain embodiments, a first adaptor protein is associated with a p65 domain and a second adaptor protein is associated with a HSF1 domain. In certain embodiments, the composition comprises a CRISPR-Cas complex having at least three functional domains, at least one of which is associated with the Cas and at least two of which are associated with dead gRNA.

[0567] The use of two different aptamers (each associated with a distinct nucleic acid-targeting guide RNAs) allows an activator-adaptor protein fusion and a repressor-adaptor protein fusion to be used, with different nucleic acid-targeting guide RNAs, to activate expression of one DNA or RNA, whilst repressing another. They, along with their different guide RNAs can be administered together, or substantially together, in a multiplexed approach. A large number of such modified nucleic acid-targeting guide RNAs can be used all at the same time, for example 10 or 20 or 30 and so forth, whilst only one (or at least a minimal number) of effector protein molecules need to be delivered, as a comparatively small number of effector protein molecules can be used with a large number modified guides. The adaptor protein may be associated (preferably linked or fused to) one or more activators or one or more repressors. For example, the adaptor protein may be associated with a first activator and a second activator. The first and second activators may be the same, but they are preferably different activators. Three or more or even four or more activators (or repressors) may be used, but package size may limit the number being higher than 5 different functional domains. Linkers are preferably used, over a direct fusion to the adaptor protein, where two or more functional domains are associated with the adaptor protein. Suitable linkers might include the GlySer linker.

[0568] It is also envisaged that the nucleic acid-targeting effector protein-guide RNA complex as a whole may be associated with two or more functional domains. For example, there may be two or more functional domains associated with the nucleic acid-targeting effector protein, or there may be two or more functional domains associated with the guide RNA (via one or more adaptor proteins), or there may be one or more functional domains associated with the nucleic acid-targeting effector protein and one or more functional domains associated with the guide RNA (via one or more adaptor proteins).

[0569] The fusion between the adaptor protein and the activator or repressor may include a linker. For example, GlySer linkers GGGS can be used. They can be used in repeats of 3 ((GGGGS)3 (SEQ ID NO: 198)) or 6 (SEQ ID NO: 199), 9 (SEQ ID NO: 200) or even 12 (SEQ ID NO: 201) or more, to provide suitable lengths, as required. Linkers can be used between the guide RNAs and the functional domain (activator or repressor), or between the nucleic acid-targeting Cas protein (Cas) and the functional domain (activator or repressor). The linkers the user to engineer appropriate amounts of “mechanical flexibility”.

[0570] The invention comprehends a nucleic acid-targeting complex comprising a nucleic acid-targeting effector protein and a guide RNA, wherein the nucleic acid-targeting effector protein comprises at least one mutation, such that the nucleic acid-targeting effector protein has no more than 5% of the activity of the nucleic acid-targeting effector protein not having the at least one mutation and, optional, at least one or more nuclear localization sequences; the guide RNA comprises a guide sequence capable of hybridizing to a target sequence in a RNA of interest in a cell; and wherein: the nucleic acid-targeting effector protein is associated with two or more functional domains; or at least one loop of the guide RNA is modified by the insertion of distinct RNA sequence(s) that bind to one or more adaptor proteins, and wherein the adaptor protein is associated with two or more functional domains; or the nucleic acid-targeting Cas protein is associated with one or more functional domains and at least one loop of the guide RNA is modified by the insertion of distinct RNA sequence(s) that bind to one or more adaptor proteins, and wherein the adaptor protein is associated with one or more functional domains.

[0571] In certain embodiments, the methods may involve the use of a second gRNA, wherein the second gRNA is a live gRNA capable of hybridizing to a second target sequence such that a second Cas CRISPR-Cas system is directed to a second genomic locus of interest in a cell with detectable indel activity at the second genomic locus resultant from nuclease activity of the Cas enzyme of the system. Accordingly, in certain embodiments, the methods involve a plurality of dead gRNAs and/or a plurality of live gRNAs.

[0572] Methods for designing, evaluating, or selecting a dead guide RNA targeting sequence (dead guide sequence) for guiding a CRISPR-Cas system to a target gene locus are described e.g. in WO2016094872, incorporated herein by reference in its entirety.

[0573] In particular embodiments, the method of selecting a dead guide RNA targeting sequence for directing a functionalized Cas to a gene locus in an organism, without cleavage, comprises a) locating one or more CRISPR motifs in the gene locus; b) analyzing the sequence downstream of each CRISPR motif by i) selecting 10 to 15 nt adjacent to the CRISPR motif, ii) determining the GC content of the sequence, and c) selecting the 10 to 15 nt sequence as a targeting sequence for use in a dead guide RNA if the GC content of the sequence is 30% more, 40% or more. In certain embodiments, the GC content of the targeting sequence is 35% or more, 40% or more, 45% or more, 50% or more, 55% or more, 60% or more, 65% or more, or 70% or more. In certain embodiments, the GC content of the targeting sequence is from 30% to 40% or from 40% to 50% or from 50% to 60% or from 60% to 70%. In an embodiment of the invention, two or more sequences in a gene locus are analyzed and the sequence having the highest GC content is selected. In an embodiment, the portion of the targeting sequence in which GC content is evaluated is 10 to 15 contiguous nucleotides of the 15 target nucleotides nearest to the PAM. In an embodiment of the invention, the portion of the guide in which GC content is considered is the 10 to 11 nucleotides or 11 to 12 nucleotides or 12 to 13 nucleotides or 13, or 14, or 15 contiguous nucleotides of the 15 nucleotides nearest to the PAM. It has been observed that increased GC content in dead guide RNAs of 16 to 20 nucleotides coincides with increased DNA cleavage and reduced functional activation.

[0574] It has been demonstrated herein that efficiency of functionalized Cas can be increased by addition of nucleotides to the 3′ end of a guide RNA which do not match a target sequence downstream of the CRISPR motif. For example, of dead guide RNA 11 to 15 nt in length, shorter guides may be less likely to promote target cleavage, but are also less efficient at promoting CRISPR system binding and functional control. It is believed that similar effects can be observed for Cas.

### Multiplex (Tandem) Targeting Approach

[0575] The inventors have shown that CRISPR enzymes as defined herein can employ more than one RNA guide without losing activity. This enables the use of the CRISPR enzymes, systems or complexes as defined herein for targeting multiple DNA targets, genes or gene loci, with a single enzyme, system or complex as defined herein. The guide RNAs may be tandemly arranged, optionally separated by a nucleotide sequence such as a direct repeat as defined herein. The position of the different guide RNAs is the tandem does not influence the activity.

[0576] Accordingly, the Cas enzyme may form part of a CRISPR system or complex, which further comprises tandemly arranged guide RNAs (gRNAs) comprising a series of 2, 3, 4, 5, 6, 7, 8, 9, 10, 15, 25, 25, 30, or more than 30 guide sequences, each capable of specifically hybridizing to a target sequence in a genomic locus of interest in a cell. In some embodiments, the functional Cas CRISPR system or complex binds to the multiple target sequences. In some embodiments, the functional CRISPR system or complex may edit the multiple target sequences, e.g., the target sequences may comprise a genomic locus, and in some embodiments there may be an alteration of gene expression. In some embodiments, the functional CRISPR system or complex may comprise further functional domains. In some embodiments, the invention provides a method for altering or modifying expression of multiple gene products. The method may comprise introducing into a cell containing said target nucleic acids, e.g., DNA molecules, or containing and expressing target nucleic acid, e.g., DNA molecules; for instance, the target nucleic acids may encode gene products or provide for expression of gene products (e.g., regulatory sequences). In some general embodiments, the Cas enzyme used for multiplex targeting is associated with one or more functional domains. In some more specific embodiments, the CRISPR enzyme used for multiplex targeting is a dead Cas as defined herein elsewhere. In some embodiments, each of the guide sequence is at least 16, 17, 18, 19, 20, 25 nucleotides, or between 16-30, or between 16-25, or between 16-20 nucleotides in length.

[0577] Examples of multiplex genome engineering using CRISPR effector proteins are provided in Cong et al. (Science February 15; 339(6121):819-23 (2013) and other publications cited herein. More specifically, multiplex gene editing using Cas is described in Zetsche et al. 2016 (doi: dx.doi.org/10.1101/049122).

[0578] The application provides methods for developing the therapeutic use of a nucleic acid-targeting system. The nucleic acid-targeting complex an effective means for modifying a target DNA or RNA (single or double stranded, linear or super-coiled). The nucleic acid-targeting complex has a wide variety of utility including modifying (e.g., deleting, inserting, translocating, inactivating, activating) a target DNA or RNA in a multiplicity of cell types. As such the nucleic acid-targeting complex has a broad spectrum of applications in, e.g., gene therapy, drug screening, disease diagnosis, and prognosis. An exemplary nucleic acid-targeting complex comprises a DNA or RNA-targeting effector protein complexed with a guide RNA hybridized to a target sequence within the target locus of interest.

[0579] The invention involves developing a therapeutic based on the CRISPR system. In particular embodiments, the therapeutic comprises a DNA-targeting effector protein and/or a guide RNA capable of hybridizing to a target sequence of interest. In particular embodiments, the therapeutic is a vector system comprising one or more vectors, wherein the one or more vectors comprises: a) a first regulatory element operably linked to a nucleotide sequence encoding the Cas effector protein; and b) a second regulatory element operably linked to one or more nucleotide sequences encoding one or more nucleic acid molecules comprising a guide RNA comprising a guide sequence, a direct repeat sequence; wherein components (a) and (b) are located on same or different vectors. In particular embodiments, the therapeutic is a composition comprising a delivery system operably configured to deliver CRISPR-Cas complex components or one or more polynucleotide sequences comprising or encoding said components into a cell, and wherein said CRISPR-Cas complex is operable in the cell; CRISPR-Cas complex components, the CRISPR-Cas complex components, comprising (I) the Cas effector protein as described herein; and guide RNA comprising the guide sequence, and a direct repeat sequence. In any such compositions, the delivery system may comprise a yeast system, a lipofection system, a microinjection system, a biolistic system, virosomes, liposomes, immunoliposomes, polycations, lipid:nucleic acid conjugates or artificial virions, or any other system as described herein. In particular embodiments, the delivery is via a particle, a nanoparticle, a lipid or a cell penetrating peptide (CPP).

[0580] In any such compositions, the composition may comprise more than one guide RNA, and each guide RNA has a different target whereby there is multiplexing. In any such systems comprising regulatory elements, at least one of said regulatory elements may comprise a tissue-specific promoter. The tissue-specific promoter may direct expression in a mammalian blood cell, in a mammalian liver cell or in a mammalian eye. In any of the above-described compositions or systems the direct repeat sequence, may comprise one or more protein-interacting RNA aptamers. The one or more aptamers may be located in the tetraloop. The one or more aptamers may be capable of binding MS2 bacteriophage coat protein.

[0581] In particular embodiments, the methods provided herein are methods of modifying a locus of interest in a cell comprising contacting the cell with any of the herein-described Cas effector proteins. Any such method may be ex vivo or in vivo.

[0582] The invention thus provides a method of treating a disease, disorder or infection in an individual in need thereof comprising identifying suitable treatment conditions and administering an effective amount of the compositions, systems or CRISPR-Cas complexes described herein. The disease, disorder or infection may comprise a viral infection. The viral infection may be HBV. The methods may also be methods for gene or genome editing.

### Gene Editing for Altering a Target Loci

[0583] In an embodiment, the template nucleic acid alters the structure of the target position by participating in homologous recombination. In an embodiment, the template nucleic acid alters the sequence of the target position. In an embodiment, the template nucleic acid results in the incorporation of a modified, or non-naturally occurring base into the target nucleic acid.

[0584] The template sequence may undergo a breakage mediated or catalyzed recombination with the target sequence. In an embodiment, the template nucleic acid may include sequence that corresponds to a site on the target sequence that is cleaved by an Cas mediated cleavage event. In an embodiment, the template nucleic acid may include sequence that corresponds to both, a first site on the target sequence that is cleaved in a first Cas mediated event, and a second site on the target sequence that is cleaved in a second Cas mediated event.

[0585] In certain embodiments, the template nucleic acid can include sequence which results in an alteration in the coding sequence of a translated sequence, e.g., one which results in the substitution of one amino acid for another in a protein product, e.g., transforming a mutant allele into a wild type allele, transforming a wild type allele into a mutant allele, and/or introducing a stop codon, insertion of an amino acid residue, deletion of an amino acid residue, or a nonsense mutation. In certain embodiments, the template nucleic acid can include sequence which results in an alteration in a non-coding sequence, e.g., an alteration in an exon or in a 5′ or 3′ non-translated or non-transcribed region. Such alterations include an alteration in a control element, e.g., a promoter, enhancer, and an alteration in a cis-acting or trans-acting control element.

[0586] A template nucleic acid having homology with a target position in a target gene may be used to alter the structure of a target sequence. The template sequence may be used to alter an unwanted structure, e.g., an unwanted or mutant nucleotide. The template nucleic acid may include sequence which, when integrated, results in: decreasing the activity of a positive control element; increasing the activity of a positive control element; decreasing the activity of a negative control element; increasing the activity of a negative control element; decreasing the expression of a gene; increasing the expression of a gene; increasing resistance to a disorder or disease; increasing resistance to viral entry; correcting a mutation or altering an unwanted amino acid residue conferring, increasing, abolishing or decreasing a biological property of a gene product, e.g., increasing the enzymatic activity of an enzyme, or increasing the ability of a gene product to interact with another molecule.

[0587] The template nucleic acid may include sequence which results in: a change in sequence of 1, 2, 3, 4, 5, 6, 7, 8, 9, 10, 11, 12 or more nucleotides of the target sequence. In an embodiment, the template nucleic acid may be 20+/−10, 30+/−10, 40+/−10, 50+/−10, 60+/−10, 70+/−10, 80+/−10, 90+/−10, 100+/−10, 1 10+/−10, 120+/−10, 130+/−10, 140+/−10, 150+/−10, 160+/−10, 170+/−10, 1 80+/−10, 190+/−10, 200+/−10, 210+/−10, of 220+/−10 nucleotides in length. In an embodiment, the template nucleic acid may be 30+/−20, 40+/−20, 50+/−20, 60+/−20, 70+/−20, 80+/−20, 90+/−20, 100+/−20, 1 10+/−20, 120+/−20, 130+/−20, 140+/−20, I 50+/−20, 160+/−20, 170+/−20, 180+/−20, 190+/−20, 200+/−20, 210+/−20, of 220+/−20 nucleotides in length. In an embodiment, the template nucleic acid is 10 to 1,000, 20 to 900, 30 to 800, 40 to 700, 50 to 600, 50 to 500, 50 to 400, 50 to 300, 50 to 200, or 50 to 100 nucleotides in length.

[0588] A template nucleic acid comprises the following components: [5′ homology arm]-[replacement sequence]-[3′ homology arm]. The homology arms provide for recombination into the chromosome, thus replacing the undesired element, e.g., a mutation or signature, with the replacement sequence. In an embodiment, the homology arms flank the most distal cleavage sites. In an embodiment, the 3′ end of the 5′ homology arm is the position next to the 5′ end of the replacement sequence. In an embodiment, the 5′ homology arm can extend at least 10, 20, 30, 40, 50, 100, 200, 300, 400, 500, 600, 700, 800, 900, 1000, 1500, or 2000 nucleotides 5′ from the 5′ end of the replacement sequence. In an embodiment, the 5′ end of the 3′ homology arm is the position next to the 3′ end of the replacement sequence. In an embodiment, the 3′ homology arm can extend at least 10, 20, 30, 40, 50, 100, 200, 300, 400, 500, 600, 700, 800, 900, 1000, 1500, or 2000 nucleotides 3′ from the 3′ end of the replacement sequence.

[0589] In certain embodiments, one or both homology arms may be shortened to avoid including certain sequence repeat elements. For example, a 5′ homology arm may be shortened to avoid a sequence repeat element. In other embodiments, a 3′ homology arm may be shortened to avoid a sequence repeat element. In some embodiments, both the 5′ and the 3′ homology arms may be shortened to avoid including certain sequence repeat elements.

[0590] In certain embodiments, a template nucleic acids for correcting a mutation may designed for use as a single-stranded oligonucleotide. When using a single-stranded oligonucleotide, 5′ and 3′ homology arms may range up to about 200 base pairs (bp) in length, e.g., at least 25, 50, 75, 100, 125, 150, 175, or 200 bp in length.

### Promotion of Non-Homologous End-Joining

[0591] In certain embodiments, nuclease-induced non-homologous end-joining (NHEJ) can be used to target gene-specific knockouts. Nuclease-induced NHEJ can also be used to remove (e.g., delete) sequence in a gene of interest. Generally, NHEJ repairs a double-strand break in the DNA by joining together the two ends; however, generally, the original sequence is restored only if two compatible ends, exactly as they were formed by the double-strand break, are perfectly ligated. The DNA ends of the double-strand break are frequently the subject of enzymatic processing, resulting in the addition or removal of nucleotides, at one or both strands, prior to rejoining of the ends. This results in the presence of insertion and/or deletion (indel) mutations in the DNA sequence at the site of the NHEJ repair. Two-thirds of these mutations typically alter the reading frame and, therefore, produce a non-functional protein. Additionally, mutations that maintain the reading frame, but which insert or delete a significant amount of sequence, can destroy functionality of the protein. This is locus dependent as mutations in critical functional domains are likely less tolerable than mutations in non-critical regions of the protein. The indel mutations generated by NHEJ are unpredictable in nature; however, at a given break site certain indel sequences are favored and are over represented in the population, likely due to small regions of microhomology. The lengths of deletions can vary widely; most commonly in the 1-50 bp range, but they can easily be greater than 50 bp, e.g., they can easily reach greater than about 100-200 bp. Insertions tend to be shorter and often include short duplications of the sequence immediately surrounding the break site. However, it is possible to obtain large insertions, and in these cases, the inserted sequence has often been traced to other regions of the genome or to plasmid DNA present in the cells.

[0592] Because NHEJ is a mutagenic process, it may also be used to delete small sequence motifs as long as the generation of a specific final sequence is not required. If a double-strand break is targeted near to a short target sequence, the deletion mutations caused by the NHEJ repair often span, and therefore remove, the unwanted nucleotides. For the deletion of larger DNA segments, introducing two double-strand breaks, one on each side of the sequence, can result in NHEJ between the ends with removal of the entire intervening sequence. Both of these approaches can be used to delete specific DNA sequences; however, the error-prone nature of NHEJ may still produce indel mutations at the site of repair.

[0593] Both double-strand-cleaving Cas molecules and single strand, or nickase, Cas molecules can be used in the methods and compositions described herein to generate NHEJ-mediated indels. NHEJ-mediated indels targeted to the gene, e.g., a coding region, e.g., an early coding region of a gene of interest can be used to knockout (i.e., eliminate expression of) a gene of interest. For example, early coding region of a gene of interest includes sequence immediately following a transcription start site, within a first exon of the coding sequence, or within 500 bp of the transcription start site (e.g., less than 500, 450, 400, 350, 300, 250, 200, 150, 100 or 50 bp).

[0594] In an embodiment, in which a guide RNA and Cas nuclease generate a double strand break for the purpose of inducing NHEJ-mediated indels, a guide RNA may be configured to position one double-strand break in close proximity to a nucleotide of the target position. In an embodiment, the cleavage site may be between 0-500 bp away from the target position (e.g., less than 500, 400, 300, 200, 100, 50, 40, 30, 25, 20, 15, 10, 9, 8, 7, 6, 5, 4, 3, 2 or 1 bp from the target position).

[0595] In an embodiment, in which two guide RNAs complexing with Cas nickases induce two single strand breaks for the purpose of inducing NHEJ-mediated indels, two guide RNAs may be configured to position two single-strand breaks to provide for NHEJ repair a nucleotide of the target position.

### CRISPR Effector Protein Complexes can Deliver Functional Effectors

[0596] Unlike CRISPR-Cas-mediated gene knockout, which permanently eliminates expression by mutating the gene at the DNA level, CRISPR-Cas knockdown allows for temporary reduction of gene expression through the use of artificial transcription factors. Mutating key residues in both DNA cleavage domains of the Cas protein, such as FnCpf1 protein (e.g. the D917A and H1006A mutations of the FnCpf1 protein or D908A, E993A, D1263A according to AsCpf1 protein or D832A, E925A, D947A or D1180A according to LbCpf1 protein) results in the generation of a catalytically inactive Cas. A catalytically inactive Cpf1 complexes with a guide RNA and localizes to the DNA sequence specified by that guide RNA's targeting domain, however, it does not cleave the target DNA. Fusion of the inactive Cpf1 protein, such as FnCpf1 protein (e.g. the D917A and H1006A mutations) to an effector domain, e.g., a transcription repression domain, enables recruitment of the effector to any DNA site specified by the guide RNA. In certain embodiments, Cas may be fused to a transcriptional repression domain and recruited to the promoter region of a gene. Especially for gene repression, it is contemplated herein that blocking the binding site of an endogenous transcription factor would aid in downregulating gene expression. In another embodiment, an inactive Cas can be fused to a chromatin modifying protein. Altering chromatin status can result in decreased expression of the target gene.

[0597] In an embodiment, a guide RNA molecule can be targeted to a known transcription response elements (e.g., promoters, enhancers, etc.), a known upstream activating sequences, and/or sequences of unknown or known function that are suspected of being able to control expression of the target DNA.

[0598] In some methods, a target polynucleotide can be inactivated to affect the modification of the expression in a cell. For example, upon the binding of a CRISPR complex to a target sequence in a cell, the target polynucleotide is inactivated such that the sequence is not transcribed, the coded protein is not produced, or the sequence does not function as the wild-type sequence does. For example, a protein or microRNA coding sequence may be inactivated such that the protein is not produced.

[0599] In certain embodiments, the CRISPR enzyme comprises one or more mutations selected from the group consisting of D917A, E1006A and D1225A and/or the one or more mutations is in a RuvC domain of the CRISPR enzyme or is a mutation as otherwise as discussed herein. In some embodiments, the CRISPR enzyme has one or more mutations in a catalytic domain, wherein when transcribed, the direct repeat sequence forms a single stem loop and the guide sequence directs sequence-specific binding of a CRISPR complex to the target sequence, and wherein the enzyme further comprises a functional domain. In some embodiments, the functional domain is a transcriptional activation domain, preferably VP64. In some embodiments, the functional domain is a transcription repression domain, preferably KRAB. In some embodiments, the transcription repression domain is SID, or concatemers of SID (eg SID4X). In some embodiments, the functional domain is an epigenetic modifying domain, such that an epigenetic modifying enzyme is provided. In some embodiments, the functional domain is an activation domain, which may be the P65 activation domain.

### Use of Inactivated CRISPR Cas Enzyme for Detection Methods Such as FISH

[0600] In one aspect, the invention provides an engineered, non-naturally occurring CRISPR-Cas system comprising a catalytically inactivate Cas protein described herein, preferably an inactivate Cas (dCas), and use this system in detection methods such as fluorescence in situ hybridization (FISH). dCas which lacks the ability to produce DNA double-strand breaks may be fused with a marker, such as fluorescent protein, such as the enhanced green fluorescent protein (eEGFP) and co-expressed with small guide RNAs to target pericentric, centric and teleomeric repeats in vivo. The dCas system can be used to visualize both repetitive sequences and individual genes in the human genome. Such new applications of labelled dCas CRISPR-cas systems may be important in imaging cells and studying the functional nuclear architecture, especially in cases with a small nucleus volume or complex 3-D structures. (Chen B, Gilbert L A, Cimini B A, Schnitzbauer J, Zhang W, Li G W, Park J, Blackburn E H, Weissman J S, Qi L S, Huang B. 2013. Dynamic imaging of genomic loci in living human cells by an optimized CRISPR/Cas system. Cell 155(7):1479-91. doi: 10.1016/j.cell.2013.12.001.)

### Nucleic Acids, Amino Acids and Proteins, Regulatory Sequences, Vectors, Etc.

[0601] The invention uses nucleic acids to bind target DNA sequences. This is advantageous as nucleic acids are much easier and cheaper to produce than proteins, and the specificity can be varied according to the length of the stretch where homology is sought. Complex 3-D positioning of multiple fingers, for example is not required. The terms “polynucleotide”, “nucleotide”, “nucleotide sequence”, “nucleic acid” and “oligonucleotide” are used interchangeably. They refer to a polymeric form of nucleotides of any length, either deoxyribonucleotides or ribonucleotides, or analogs thereof. Polynucleotides may have any three dimensional structure, and may perform any function, known or unknown. The following are non-limiting examples of polynucleotides: coding or non-coding regions of a gene or gene fragment, loci (locus) defined from linkage analysis, exons, introns, messenger RNA (mRNA), transfer RNA, ribosomal RNA, short interfering RNA (siRNA), short-hairpin RNA (shRNA), micro-RNA (miRNA), ribozymes, cDNA, recombinant polynucleotides, branched polynucleotides, plasmids, vectors, isolated DNA of any sequence, isolated RNA of any sequence, nucleic acid probes, and primers. The term also encompasses nucleic-acid-like structures with synthetic backbones, see, e.g., Eckstein, 1991; Baserga et al., 1992; Milligan, 1993; WO 97/03211; WO 96/39154; Mata, 1997; Strauss-Soukup, 1997; and Samstag, 1996. A polynucleotide may comprise one or more modified nucleotides, such as methylated nucleotides and nucleotide analogs. If present, modifications to the nucleotide structure may be imparted before or after assembly of the polymer. The sequence of nucleotides may be interrupted by non-nucleotide components. A polynucleotide may be further modified after polymerization, such as by conjugation with a labeling component. As used herein the term “wild type” is a term of the art understood by skilled persons and means the typical form of an organism, strain, gene or characteristic as it occurs in nature as distinguished from mutant or variant forms. A “wild type” can be a base line. As used herein the term “variant” should be taken to mean the exhibition of qualities that have a pattern that deviates from what occurs in nature. The terms “non-naturally occurring” or “engineered” are used interchangeably and indicate the involvement of the hand of man. The terms, when referring to nucleic acid molecules or polypeptides mean that the nucleic acid molecule or the polypeptide is at least substantially free from at least one other component with which they are naturally associated in nature and as found in nature. “Complementarity” refers to the ability of a nucleic acid to form hydrogen bond(s) with another nucleic acid sequence by either traditional Watson-Crick base pairing or other non-traditional types. A percent complementarity indicates the percentage of residues in a nucleic acid molecule which can form hydrogen bonds (e.g., Watson-Crick base pairing) with a second nucleic acid sequence (e.g., 5, 6, 7, 8, 9, 10 out of 10 being 50%, 60%, 70%, 80%, 90%, and 100% complementary). “Perfectly complementary” means that all the contiguous residues of a nucleic acid sequence will hydrogen bond with the same number of contiguous residues in a second nucleic acid sequence. “Substantially complementary” as used herein refers to a degree of complementarity that is at least 60%, 65%, 70%, 75%, 80%, 85%, 90%, 95%, 97%, 98%, 99%, or 100% over a region of 8, 9, 10, 11, 12, 13, 14, 15, 16, 17, 18, 19, 20, 21, 22, 23, 24, 25, 30, 35, 40, 45, 50, or more nucleotides, or refers to two nucleic acids that hybridize under stringent conditions. As used herein, “stringent conditions” for hybridization refer to conditions under which a nucleic acid having complementarity to a target sequence predominantly hybridizes with the target sequence, and substantially does not hybridize to non-target sequences. Stringent conditions are generally sequence-dependent, and vary depending on a number of factors. In general, the longer the sequence, the higher the temperature at which the sequence specifically hybridizes to its target sequence. Non-limiting examples of stringent conditions are described in detail in Tijssen (1993), Laboratory Techniques In Biochemistry And Molecular Biology-Hybridization With Nucleic Acid Probes Part I, Second Chapter “Overview of principles of hybridization and the strategy of nucleic acid probe assay”, Elsevier, N.Y. Where reference is made to a polynucleotide sequence, then complementary or partially complementary sequences are also envisaged. These are preferably capable of hybridizing to the reference sequence under highly stringent conditions. Generally, in order to maximize the hybridization rate, relatively low-stringency hybridization conditions are selected: about 20 to 25° C. lower than the thermal melting point (Tm). The Tm is the temperature at which 50% of specific target sequence hybridizes to a perfectly complementary probe in solution at a defined ionic strength and pH. Generally, in order to require at least about 85% nucleotide complementarity of hybridized sequences, highly stringent washing conditions are selected to be about 5 to 15° C. lower than the Tm. In order to require at least about 70% nucleotide complementarity of hybridized sequences, moderately-stringent washing conditions are selected to be about 15 to 30° C. lower than the Tm. Highly permissive (very low stringency) washing conditions may be as low as 50° C. below the Tm, allowing a high level of mis-matching between hybridized sequences. Those skilled in the art will recognize that other physical and chemical parameters in the hybridization and wash stages can also be altered to affect the outcome of a detectable hybridization signal from a specific level of homology between target and probe sequences. Preferred highly stringent conditions comprise incubation in 50% formamide, 5×SSC, and 1% SDS at 42° C., or incubation in 5×SSC and 1% SDS at 65° C., with wash in 0.2×SSC and 0.1% SDS at 65° C. “Hybridization” refers to a reaction in which one or more polynucleotides react to form a complex that is stabilized via hydrogen bonding between the bases of the nucleotide residues. The hydrogen bonding may occur by Watson Crick base pairing, Hoogstein binding, or in any other sequence specific manner. The complex may comprise two strands forming a duplex structure, three or more strands forming a multi stranded complex, a single self-hybridizing strand, or any combination of these. A hybridization reaction may constitute a step in a more extensive process, such as the initiation of PCR, or the cleavage of a polynucleotide by an enzyme. A sequence capable of hybridizing with a given sequence is referred to as the “complement” of the given sequence. As used herein, the term “genomic locus” or “locus” (plural loci) is the specific location of a gene or DNA sequence on a chromosome. A “gene” refers to stretches of DNA or RNA that encode a polypeptide or an RNA chain that has functional role to play in an organism and hence is the molecular unit of heredity in living organisms. For the purpose of this invention it may be considered that genes include regions which regulate the production of the gene product, whether or not such regulatory sequences are adjacent to coding and/or transcribed sequences. Accordingly, a gene includes, but is not necessarily limited to, promoter sequences, terminators, translational regulatory sequences such as ribosome binding sites and internal ribosome entry sites, enhancers, silencers, insulators, boundary elements, replication origins, matrix attachment sites and locus control regions. As used herein, “expression of a genomic locus” or “gene expression” is the process by which information from a gene is used in the synthesis of a functional gene product. The products of gene expression are often proteins, but in non-protein coding genes such as rRNA genes or tRNA genes, the product is functional RNA. The process of gene expression is used by all known life—eukaryotes (including multicellular organisms), prokaryotes (bacteria and archaea) and viruses to generate functional products to survive. As used herein “expression” of a gene or nucleic acid encompasses not only cellular gene expression, but also the transcription and translation of nucleic acid(s) in cloning systems and in any other context. As used herein, “expression” also refers to the process by which a polynucleotide is transcribed from a DNA template (such as into and mRNA or other RNA transcript) and/or the process by which a transcribed mRNA is subsequently translated into peptides, polypeptides, or proteins. Transcripts and encoded polypeptides may be collectively referred to as “gene product.” If the polynucleotide is derived from genomic DNA, expression may include splicing of the mRNA in a eukaryotic cell. The terms “polypeptide”, “peptide” and “protein” are used interchangeably herein to refer to polymers of amino acids of any length. The polymer may be linear or branched, it may comprise modified amino acids, and it may be interrupted by non amino acids. The terms also encompass an amino acid polymer that has been modified; for example, disulfide bond formation, glycosylation, lipidation, acetylation, phosphorylation, or any other manipulation, such as conjugation with a labeling component. As used herein the term “amino acid” includes natural and/or unnatural or synthetic amino acids, including glycine and both the D or L optical isomers, and amino acid analogs and peptidomimetics. As used herein, the term “domain” or “protein domain” refers to a part of a protein sequence that may exist and function independently of the rest of the protein chain. As described in aspects of the invention, sequence identity is related to sequence homology. Homology comparisons may be conducted by eye, or more usually, with the aid of readily available sequence comparison programs. These commercially available computer programs may calculate percent (%) homology between two or more sequences and may also calculate the sequence identity shared by two or more amino acid or nucleic acid sequences.

[0602] As used herein the term “wild type” is a term of the art understood by skilled persons and means the typical form of an organism, strain, gene or characteristic as it occurs in nature as distinguished from mutant or variant forms. A “wild type” can be a base line.

[0603] As used herein the term “variant” should be taken to mean the exhibition of qualities that have a pattern that deviates from what occurs in nature.

[0604] The terms “non-naturally occurring” or “engineered” are used interchangeably and indicate the involvement of the hand of man. The terms, when referring to nucleic acid molecules or polypeptides mean that the nucleic acid molecule or the polypeptide is at least substantially free from at least one other component with which they are naturally associated in nature and as found in nature. In all aspects and embodiments, whether they include these terms or not, it will be understood that, preferably, the may be optional and thus preferably included or not preferably not included. Furthermore, the terms “non-naturally occurring” and “engineered” may be used interchangeably and so can therefore be used alone or in combination and one or other may replace mention of both together. In particular, “engineered” is preferred in place of “non-naturally occurring” or “non-naturally occurring and/or engineered.”

[0605] Sequence homologies may be generated by any of a number of computer programs known in the art, for example BLAST or FASTA, etc. A suitable computer program for carrying out such an alignment is the GCG Wisconsin Bestfit package (University of Wisconsin, U.S.A; Devereux et al., 1984, Nucleic Acids Research 12:387). Examples of other software than may perform sequence comparisons include, but are not limited to, the BLAST package (see Ausubel et al., 1999 ibid—Chapter 18), FASTA (Atschul et al., 1990, J. Mol. Biol., 403-410) and the GENEWORKS suite of comparison tools. Both BLAST and FASTA are available for offline and online searching (see Ausubel et al., 1999 ibid, pages 7-58 to 7-60). However it is preferred to use the GCG Bestfit program. Percentage (%) sequence homology may be calculated over contiguous sequences, i.e., one sequence is aligned with the other sequence and each amino acid or nucleotide in one sequence is directly compared with the corresponding amino acid or nucleotide in the other sequence, one residue at a time. This is called an “ungapped” alignment. Typically, such ungapped alignments are performed only over a relatively short number of residues. Although this is a very simple and consistent method, it fails to take into consideration that, for example, in an otherwise identical pair of sequences, one insertion or deletion may cause the following amino acid residues to be put out of alignment, thus potentially resulting in a large reduction in % homology when a global alignment is performed. Consequently, most sequence comparison methods are designed to produce optimal alignments that take into consideration possible insertions and deletions without unduly penalizing the overall homology or identity score. This is achieved by inserting “gaps” in the sequence alignment to try to maximize local homology or identity. However, these more complex methods assign “gap penalties” to each gap that occurs in the alignment so that, for the same number of identical amino acids, a sequence alignment with as few gaps as possible—reflecting higher relatedness between the two compared sequences—may achieve a higher score than one with many gaps. “Affinity gap costs” are typically used that charge a relatively high cost for the existence of a gap and a smaller penalty for each subsequent residue in the gap. This is the most commonly used gap scoring system. High gap penalties may, of course, produce optimized alignments with fewer gaps. Most alignment programs allow the gap penalties to be modified. However, it is preferred to use the default values when using such software for sequence comparisons. For example, when using the GCG Wisconsin Bestfit package the default gap penalty for amino acid sequences is −12 for a gap and −4 for each extension. Calculation of maximum % homology therefore first requires the production of an optimal alignment, taking into consideration gap penalties. A suitable computer program for carrying out such an alignment is the GCG Wisconsin Bestfit package (Devereux et al., 1984 Nuc. Acids Research 12 p387). Examples of other software than may perform sequence comparisons include, but are not limited to, the BLAST package (see Ausubel et al., 1999 Short Protocols in Molecular Biology, 4th Ed.—Chapter 18), FASTA (Altschul et al., 1990 J. Mol. Biol. 403-410) and the GENEWORKS suite of comparison tools. Both BLAST and FASTA are available for offline and online searching (see Ausubel et al., 1999, Short Protocols in Molecular Biology, pages 7-58 to 7-60). However, for some applications, it is preferred to use the GCG Bestfit program. A new tool, called BLAST 2 Sequences is also available for comparing protein and nucleotide sequences (see FEMS Microbiol Lett. 1999 174(2): 247-50; FEMS Microbiol Lett. 1999 177(1): 187-8 and the website of the National Center for Biotechnology information at the website of the National Institutes for Health). Although the final % homology may be measured in terms of identity, the alignment process itself is typically not based on an all-or-nothing pair comparison. Instead, a scaled similarity score matrix is generally used that assigns scores to each pair-wise comparison based on chemical similarity or evolutionary distance. An example of such a matrix commonly used is the BLOSUM62 matrix—the default matrix for the BLAST suite of programs. GCG Wisconsin programs generally use either the public default values or a custom symbol comparison table, if supplied (see user manual for further details). For some applications, it is preferred to use the public default values for the GCG package, or in the case of other software, the default matrix, such as BLOSUM62. Alternatively, percentage homologies may be calculated using the multiple alignment feature in DNASIS™ (Hitachi Software), based on an algorithm, analogous to CLUSTAL (Higgins D G & Sharp P M (1988), Gene 73(1), 237-244). Once the software has produced an optimal alignment, it is possible to calculate % homology, preferably % sequence identity. The software typically does this as part of the sequence comparison and generates a numerical result. The sequences may also have deletions, insertions or substitutions of amino acid residues which produce a silent change and result in a functionally equivalent substance. Deliberate amino acid substitutions may be made on the basis of similarity in amino acid properties (such as polarity, charge, solubility, hydrophobicity, hydrophilicity, and/or the amphipathic nature of the residues) and it is therefore useful to group amino acids together in functional groups. Amino acids may be grouped together based on the properties of their side chains alone. However, it is more useful to include mutation data as well. The sets of amino acids thus derived are likely to be conserved for structural reasons. These sets may be described in the form of a Venn diagram (Livingstone C. D. and Barton G. J. (1993) “Protein sequence alignments: a strategy for the hierarchical analysis of residue conservation” Comput. Appl. Biosci. 9: 745-756) (Taylor W. R. (1986) “The classification of amino acid conservation” J. Theor. Biol. 119; 205-218). Conservative substitutions may be made, for example according to the table below which describes a generally accepted Venn diagram grouping of amino acids.

TABLE 11

| Set | | Sub-set | |
|---|---|---|---|
| Hydrophobic | F W Y H K M I L V A G C | Aromatic | F W Y H |
| | (SEQ ID NO: 202) | | (SEQ ID NO: 205) |
| | | Aliphatic | I L V |
| Polar | W Y H K R E D C S T N Q | Charged | H K R E D |
| | (SEQ ID NO: 203) | | (SEQ ID NO: 206) |
| | | Positively charged | H K R |
| | | Negatively charged | E D |
| Small | V C A G S P T N D | Tiny | A G S |
| | (SEQ ID NO: 204) | | |

[0606] The terms “therapeutic agent”, “therapeutic capable agent” or “treatment agent” are used interchangeably and refer to a molecule or compound that confers some beneficial effect upon administration to a subject. The beneficial effect includes enablement of diagnostic determinations; amelioration of a disease, symptom, disorder, or pathological condition; reducing or preventing the onset of a disease, symptom, disorder or condition; and generally counteracting a disease, symptom, disorder or pathological condition.

[0607] As used herein, “treatment” or “treating,” or “palliating” or “ameliorating” are used interchangeably. These terms refer to an approach for obtaining beneficial or desired results including but not limited to a therapeutic benefit and/or a prophylactic benefit. By therapeutic benefit is meant any therapeutically relevant improvement in or effect on one or more diseases, conditions, or symptoms under treatment. For prophylactic benefit, the compositions may be administered to a subject at risk of developing a particular disease, condition, or symptom, or to a subject reporting one or more of the physiological symptoms of a disease, even though the disease, condition, or symptom may not have yet been manifested.

[0608] The term “effective amount” or “therapeutically effective amount” refers to the amount of an agent that is sufficient to effect beneficial or desired results. The therapeutically effective amount may vary depending upon one or more of: the subject and disease condition being treated, the weight and age of the subject, the severity of the disease condition, the manner of administration and the like, which can readily be determined by one of ordinary skill in the art. The term also applies to a dose that will provide an image for detection by any one of the imaging methods described herein. The specific dose may vary depending on one or more of: the particular agent chosen, the dosing regimen to be followed, whether it is administered in combination with other compounds, timing of administration, the tissue to be imaged, and the physical delivery system in which it is carried.

[0609] The practice of the present invention employs, unless otherwise indicated, conventional techniques of immunology, biochemistry, chemistry, molecular biology, microbiology, cell biology, genomics and recombinant DNA, which are within the skill of the art. See Sambrook, Fritsch and Maniatis, MOLECULAR CLONING: A LABORATORY MANUAL, 2nd edition (1989); CURRENT PROTOCOLS IN MOLECULAR BIOLOGY (F. M. Ausubel, et al. eds., (1987)); the series METHODS IN ENZYMOLOGY (Academic Press, Inc.): PCR 2: A PRACTICAL APPROACH (M. J. MacPherson, B. D. Hames and G. R. Taylor eds. (1995)), Harlow and Lane, eds. (1988) ANTIBODIES, A LABORATORY MANUAL, and ANIMAL CELL CULTURE (R. I. Freshney, ed. (1987)).

[0610] Embodiments of the invention include sequences (both polynucleotide or polypeptide) which may comprise homologous substitution (substitution and replacement are both used herein to mean the interchange of an existing amino acid residue or nucleotide, with an alternative residue or nucleotide) that may occur i.e., like-for-like substitution in the case of amino acids such as basic for basic, acidic for acidic, polar for polar, etc. Non-homologous substitution may also occur i.e., from one class of residue to another or alternatively involving the inclusion of unnatural amino acids such as ornithine (hereinafter referred to as Z), diaminobutyric acid ornithine (hereinafter referred to as B), norleucine ornithine (hereinafter referred to as O), pyriylalanine, thienylalanine, naphthylalanine and phenylglycine. Variant amino acid sequences may include suitable spacer groups that may be inserted between any two amino acid residues of the sequence including alkyl groups such as methyl, ethyl or propyl groups in addition to amino acid spacers such as glycine or β-alanine residues. A further form of variation, which involves the presence of one or more amino acid residues in peptoid form, may be well understood by those skilled in the art. For the avoidance of doubt, “the peptoid form” is used to refer to variant amino acid residues wherein the α-carbon substituent group is on the residue's nitrogen atom rather than the α-carbon. Processes for preparing peptides in the peptoid form are known in the art, for example Simon R J et al., PNAS (1992) 89(20), 9367-9371 and Horwell D C, Trends Biotechnol. (1995) 13(4), 132-134.

[0611] Homology modelling: Corresponding residues in other Cas orthologs can be identified by the methods of Zhang et al., 2012 (Nature; 490(7421): 556-60) and Chen et al., 2015 (PLoS Comput Biol; 11(5): e1004248)—a computational protein-protein interaction (PPI) method to predict interactions mediated by domain-motif interfaces. PrePPI (Predicting PPI), a structure based PPI prediction method, combines structural evidence with non-structural evidence using a Bayesian statistical framework. The method involves taking a pair a query proteins and using structural alignment to identify structural representatives that correspond to either their experimentally determined structures or homology models. Structural alignment is further used to identify both close and remote structural neighbors by considering global and local geometric relationships. Whenever two neighbors of the structural representatives form a complex reported in the Protein Data Bank, this defines a template for modelling the interaction between the two query proteins. Models of the complex are created by superimposing the representative structures on their corresponding structural neighbor in the template. This approach is further described in Dey et al., 2013 (Prot Sci; 22: 359-66).

[0612] For purpose of this invention, amplification means any method employing a primer and a polymerase capable of replicating a target sequence with reasonable fidelity. Amplification may be carried out by natural or recombinant DNA polymerases such as TaqGold™, T7 DNA polymerase, Klenow fragment of E. coli DNA polymerase, and reverse transcriptase. A preferred amplification method is PCR.

### Functional Domains

[0613] In some embodiments, one or more functional domains are associated with the Cas effector protein. In some embodiments, one or more functional domains are associated with an adaptor protein, for example as used with the modified guides of Konnerman et al. (Nature 517, 583-588, 29 Jan. 2015). In some embodiments, one or more functional domains are associated with a dead gRNA (dRNA). In some embodiments, a dRNA complex with active Cas effector protein directs gene regulation by a functional domain at on gene locus while an gRNA directs DNA cleavage by the active Cas effector protein at another locus, for example as described analogously in CRISPR-Cas9 systems by Dahlman et al., ‘Orthogonal gene control with a catalytically active Cas9 nuclease’ (in press). In some embodiments, dRNAs are selected to maximize selectivity of regulation for a gene locus of interest compared to off-target regulation. In some embodiments, dRNAs are selected to maximize target gene regulation and minimize target cleavage

[0614] For the purposes of the following discussion, reference to a functional domain could be a functional domain associated with the Cas effector protein or a functional domain associated with the adaptor protein.

[0615] In the practice of the invention, loops of the gRNA may be extended, without colliding with the Cas protein by the insertion of distinct RNA loop(s) or distinct sequence(s) that may recruit adaptor proteins that can bind to the distinct RNA loop(s) or distinct sequence(s). The adaptor proteins may include but are not limited to orthogonal RNA-binding protein/aptamer combinations that exist within the diversity of bacteriophage coat proteins, including those described in this application. In some embodiments, the one or more functional domains is an NLS (Nuclear Localization Sequence) or an NES (Nuclear Export Signal). In some embodiments, the one or more functional domains is a transcriptional activation domain comprises VP64, p65, MyoD1, HSF1, RTA, SET7/9 and a histone acetyltransferase. Other references herein to activation (or activator) domains in respect of those associated with the CRISPR enzyme include any known transcriptional activation domain and specifically VP64, p65, MyoD1, HSF1, RTA, SET7/9 or a histone acetyltransferase.

[0616] In some embodiments, the one or more functional domains is a transcriptional repressor domain. In some embodiments, the transcriptional repressor domain is a KRAB domain. In some embodiments, the transcriptional repressor domain is a NuE domain, NcoR domain, SID domain or a SID4X domain.

[0617] In some embodiments, the one or more functional domains have one or more activities comprising methylase activity, demethylase activity, transcription activation activity, transcription repression activity, transcription release factor activity, histone modification activity, RNA cleavage activity, DNA cleavage activity, DNA integration activity or nucleic acid binding activity.

[0618] Histone modifying domains are also preferred in some embodiments. Exemplary histone modifying domains are discussed below. Transposase domains, HR (Homologous Recombination) machinery domains, recombinase domains, and/or integrase domains are also preferred as the present functional domains. In some embodiments, DNA integration activity includes HR machinery domains, integrase domains, recombinase domains and/or transposase domains. Histone acetyltransferases are preferred in some embodiments.

[0619] In some embodiments, the DNA cleavage activity is due to a nuclease. In some embodiments, the nuclease comprises a Fok1 nuclease. See, “Dimeric CRISPR RNA-guided FokI nucleases for highly specific genome editing”, Shengdar Q. Tsai, Nicolas Wyvekens, Cyd Khayter, Jennifer A. Foden, Vishal Thapar, Deepak Reyon, Mathew J. Goodwin, Martin J. Aryee, J. Keith Joung Nature Biotechnology 32(6): 569-77 (2014), relates to dimeric RNA-guided FokI Nucleases that recognize extended sequences and can edit endogenous genes with high efficiencies in human cells.

[0620] In some embodiments, the one or more functional domains is attached to the Cas effector protein so that upon binding to the sgRNA and target the functional domain is in a spatial orientation allowing for the functional domain to function in its attributed function.

[0621] In some embodiments, the one or more functional domains is attached to the adaptor protein so that upon binding of the Cas effector protein to the gRNA and target, the functional domain is in a spatial orientation allowing for the functional domain to function in its attributed function.

[0622] In an aspect the invention provides a composition as herein discussed wherein the one or more functional domains is attached to the Cas effector protein or adaptor protein via a linker, optionally a GlySer linker, as discussed herein.

[0623] Endogenous transcriptional repression is often mediated by chromatin modifying enzymes such as histone methyltransferases (HMTs) and deacetylases (HDACs). Repressive histone effector domains are known and an exemplary list is provided below. In the exemplary table, preference was given to proteins and functional truncations of small size to facilitate efficient viral packaging (for instance via AAV). In general, however, the domains may include HDACs, histone methyltransferases (HMTs), and histone acetyltransferase (HAT) inhibitors, as well as HDAC and HMT recruiting proteins. The functional domain may be or include, in some embodiments, HDAC Effector Domains, HDAC Recruiter Effector Domains, Histone Methyltransferase (HMT) Effector Domains, Histone Methyltransferase (HMT) Recruiter Effector Domains, or Histone Acetyltransferase Inhibitor Effector Domains.

TABLE 12
HDAC Effector Domains

| | | | | | Full | Selected | Final | |
|---|---|---|---|---|---|---|---|---|
| Subtype/ | | Substrate | Modification | | size | truncation | size | Catalytic |
| Complex | Name | (if known) | (if known) | Organism | (aa) | (aa) | (aa) | domain |
| HDAC I | HDAC8 | — | — | V. laevis | 325 | 1-325 | 325 | 1-272: |
| | | | | | | | | HDAC |
| HDAC I | RPD3 | — | — | S. cerevisiae | 433 | 19-340 | 322 | 19-331: |
| | | | | | | | (Vannier) | HDAC |
| HDAC | MesoLo4 | — | — | M. loti | 300 | 1-300 | 300 | — |
| IV | | | | | | (Gregoretti) | | |
| HDAC | HDAC11 | — | — | H. sapiens | 347 | 1-347 (Gao) | 347 | 14-326: |
| IV | | | | | | | | HDAC |
| HD2 | HDT1 | — | — | A. thaliana | 245 | 1-211 (Wu) | 211 | — |
| SIRT I | SIRT3 | H3K9Ac | — | H. sapiens | 399 | 143-399 (Scher) | 257 | 126-382: |
| | | H4K16Ac | | | | | | SIRT |
| | | H3K56Ac | | | | | | |
| SIRT I | HST2 | — | — | C. albicans | 331 | 1-331 (Hnisz) | 331 | — |
| SIRT I | CobB | — | — | E. coli (K12) | 242 | 1-242 (Landry) | 242 | — |
| SIRT I | HST2 | — | — | S. cerevisiae | 357 | 8-298 (Wilson) | 291 | — |
| SIRT III | SIRT5 | H4K8Ac | — | H. sapiens | 310 | 37-310 (Gertz) | 274 | 41-309: |
| | | H4K16Ac | | | | | | SIRT |
| SIRT III | Sir2A | — | — | P. falciparum | 273 | 1-273 (Zhu) | 273 | 19-273: |
| | | | | | | | | SIRT |
| SIRT IV | SIRT6 | H3K9Ac | — | H. sapiens | 355 | 1-289 (Tennen) | 289 | 35-274: |
| | | H3K56Ac | | | | | | SIRT |

[0624] Accordingly, the repressor domains of the present invention may be selected from histone methyltransferases (HMTs), histone deacetylases (HDACs), histone acetyltransferase (HAT) inhibitors, as well as HDAC and HMT recruiting proteins.

[0625] The HDAC domain may be any of those in the table above, namely: HDAC8, RPD3, MesoLo4, HDAC11, HDT1, SIRT3, HST2, CobB, HST2, SIRT5, Sir2A, or SIRT6.

[0626] In some embodiment, the functional domain may be a HDAC Recruiter Effector Domain. Preferred examples include those in Table 13 below, namely MeCP2, MBD2b, Sin3a, NcoR, SALL1, RCOR1. NcoR is exemplified in the present Examples and, although preferred, it is envisaged that others in the class will also be useful.

TABLE 13
HDAC Recruiter Effector Domains

| | | | | | Full | Selected | Final | |
|---|---|---|---|---|---|---|---|---|
| Subtype/ | | Substrate | Modification | | size | truncation | size | Catalytic |
| Complex | Name | (if known) | (if known) | Organism | (aa) | (aa) | (aa) | domain |
| Sin3a | MeCP2 | — | — | R. norvegicus | 492 | 207-492 (Nan) | 286 | — |
| Sin3a | MBD2b | — | — | H. sapiens | 262 | 45-262 (Boeke) | 218 | — |
| Sin3a | Sin3a | — | — | H. sapiens | 1273 | 524-851 | 328 | 627-829: |
| | | | | | | (Laherty) | | HDAC1 |
| | | | | | | | | interaction |
| NcoR | NcoR | — | — | H. sapiens | 2440 | 420-488 | 69 | — |
| | | | | | | (Zhang) | | |
| NuRD | SALL1 | — | — | M. musculus | 1322 | 1-93 (Lauberth) | 93 | — |
| CoREST | RCOR1 | — | — | H. sapiens | 482 | 81-300 (Gu, | 220 | — |
| | | | | | | Ouyang) | | |

[0627] In some embodiment, the functional domain may be a Methyltransferase (HMT) Effector Domain. Preferred examples include those in Table 14 below, namely NUE, vSET, EHMT2/G9A, SUV39H1, dim-5, KYP, SUVR4, SET4, SET1, SETD8, and TgSET8. NUE is exemplified in the present Examples and, although preferred, it is envisaged that others in the class will also be useful.

TABLE 14
Histone Methyltransferase (HMT) Effector Domains

| | | | | | Full | Selected | Final | |
|---|---|---|---|---|---|---|---|---|
| Subtype/ | | Substrate | Modification | | size | truncation | size | Catalytic |
| Complex | Name | (if known) | (if known) | Organism | (aa) | (aa) | (aa) | domain |
| SET | NUE | H2B, H3, | — | C. trachomatis | 219 | 1-219 | 219 | — |
| | | H4 | | | | (Pennini) | | |
| SET | vSET | — | H3K27me3 | P. bursaria | 119 | 1-119 | 119 | 4-112: SET2 |
| | | | | chlorella virus | | (Mujtaba) | | |
| SUV39 | EHMT2/ | H1.4K2, | H3K9me1/2 | M. musculus | 1263 | 969-1263 | 295 | 1025-1233: |
| family | G9A | H3K9, | HlK25me1 | | | (Tachibana) | | preSET, SET, |
| | | H3K27 | | | | | | postSET |
| SUV39 | SUV39 | — | H3K9me2/3 | H. sapiens | 412 | 79-412 | 334 | 172-412: |
| | H1 | | | | | (Snowden) | | preSET, SET, |
| | | | | | | | | postSET |
| Suvar3-9 | dim-5 | — | H3K9me3 | N. crassa | 331 | 1-331 | 331 | 77-331: preSET, |
| | | | | | | (Rathert) | | SET, postSET |
| Suvar3-9 | KYP | — | H3K9me1/2 | A. thaliana | 624 | 335-601 | 267 | — |
| (SUVH | | | | | | | (Jackson) | |
| subfamily) | | | | | | | | |
| Suvar3-9 | SUVR4 | H3K9me1 | H3K9me2/3 | A. thaliana | 492 | 180-492 | 313 | 192-462: |
| (SUVR | | | | | | | (Thorstensen) | preSET, SET, |
| subfamily) | | | | | | | | postSET |
| Suvar4-20 | SET4 | — | H4K20me3 | C. elegans | 288 | 1-288 | 288 | — |
| | | | | | | (Vielle) | | |
| SET8 | SET1 | — | H4K20me1 | C. elegans | 242 | 1-242 | 242 | — |
| | | | | | | (Vielle) | | |
| SET8 | SETD8 | — | H4K20me1 | H. sapiens | 393 | 185-393 | 209 | 256-382: SET |
| | | | | | | | (Couture) | |
| SET8 | TgSET8 | — | H4K20me1/ | T. gondii | 1893 | 1590-1893 | 304 | 1749-1884: SET |
| | | | 2/3 | | | (Sautel) | | |

[0628] In some embodiment, the functional domain may be a Histone Methyltransferase (HMT) Recruiter Effector Domain. Preferred examples include those in Table 15 below, namely Hp1a, PHF 19, and NIPP 1.

TABLE 15
Histone Methyltransferase (HMT) Recruiter Effector Domains

| | | | | | Full | Selected | Final | |
|---|---|---|---|---|---|---|---|---|
| Subtype/ | | Substrate | Modification | | size | truncation | size | Catalytic |
| Complex | Name | (if known) | (if known) | Organism | (aa) | (aa) | (aa) | domain |
| — | Hp1a | — | H3K9me3 | M. musculus | 191 | 73-191 | 119 | 121-179: |
| | | | | | | | (Hathaway) | chromoshadow |
| — | PHF19 | — | H3K27me3 | H. sapiens | 580 | (1-250) + | 335 | 163-250: PHD2 |
| | | | | | | GGSG | (Ballare) | |
| | | | | | | linker + | | |
| | | | | | | (500-580) | | |
| — | NIPP1 | — | H3K27me3 | H. sapiens | 351 | 1-329 (Jin) | 329 | 310-329: EED |

[0629] In some embodiment, the functional domain may be Histone Acetyltransferase Inhibitor Effector Domain. Preferred examples include SET/TAF-113 listed in the Table below.

TABLE 16
Histone Acetyltransferase Inhibitor Effector Domains

| | | | | | Full | Selected | Final | |
|---|---|---|---|---|---|---|---|---|
| Subtype/ | | Substrate | Modification | | size | truncation | size | Catalytic |
| Complex | Name | (if known) | (if known) | Organism | (aa) | (aa) | (aa) | domain |
| — | SET/TAF-1β | — | — | M. musculus | 289 | 1-289 | 289 | — |
| | | | | | | (Cervoni) | | |

[0630] It is also preferred to target endogenous (regulatory) control elements (such as enhancers and silencers) in addition to a promoter or promoter-proximal elements. Thus, the invention can also be used to target endogenous control elements (including enhancers and silencers) in addition to targeting of the promoter. These control elements can be located upstream and downstream of the transcriptional start site (TSS), starting from 200 bp from the TSS to 100 kb away. Targeting of known control elements can be used to activate or repress the gene of interest. In some cases, a single control element can influence the transcription of multiple target genes. Targeting of a single control element could therefore be used to control the transcription of multiple genes simultaneously.

[0631] Targeting of putative control elements on the other hand (e.g. by tiling the region of the putative control element as well as 200 bp up to 100 kB around the element) can be used as a means to verify such elements (by measuring the transcription of the gene of interest) or to detect novel control elements (e.g. by tiling 100 kb upstream and downstream of the TSS of the gene of interest). In addition, targeting of putative control elements can be useful in the context of understanding genetic causes of disease. Many mutations and common SNP variants associated with disease phenotypes are located outside coding regions. Targeting of such regions with either the activation or repression systems described herein can be followed by readout of transcription of either a) a set of putative targets (e.g. a set of genes located in closest proximity to the control element) or b) whole-transcriptome readout by e.g. RNAseq or microarray. This would allow for the identification of likely candidate genes involved in the disease phenotype. Such candidate genes could be useful as novel drug targets.

[0632] Histone acetyltransferase (HAT) inhibitors are mentioned herein. However, an alternative in some embodiments is for the one or more functional domains to comprise an acetyltransferase, preferably a histone acetyltransferase. These are useful in the field of epigenomics, for example in methods of interrogating the epigenome. Methods of interrogating the epigenome may include, for example, targeting epigenomic sequences. Targeting epigenomic sequences may include the guide being directed to an epigenomic target sequence. Epigenomic target sequence may include, in some embodiments, include a promoter, silencer or an enhancer sequence.

[0633] Use of a functional domain linked to a Cas effector protein as described herein, preferably a dead-Cas effector protein, more preferably a dead-FnCpf1 effector protein, to target epigenomic sequences can be used to activate or repress promoters, silencer or enhancers.

[0634] Examples of acetyltransferases are known but may include, in some embodiments, histone acetyltransferases. In some embodiments, the histone acetyltransferase may comprise the catalytic core of the human acetyltransferase p300 (Gerbasch & Reddy, Nature Biotech 6 Apr. 2015).

[0635] In some preferred embodiments, the functional domain is linked to a dead-Cas effector protein to target and activate epigenomic sequences such as promoters or enhancers. One or more guides directed to such promoters or enhancers may also be provided to direct the binding of the CRISPR enzyme to such promoters or enhancers.

[0636] The term “associated with” is used here in relation to the association of the functional domain to the Cas effector protein or the adaptor protein. It is used in respect of how one molecule ‘associates’ with respect to another, for example between an adaptor protein and a functional domain, or between the Cas effector protein and a functional domain. In the case of such protein-protein interactions, this association may be viewed in terms of recognition in the way an antibody recognizes an epitope. Alternatively, one protein may be associated with another protein via a fusion of the two, for instance one subunit being fused to another subunit. Fusion typically occurs by addition of the amino acid sequence of one to that of the other, for instance via splicing together of the nucleotide sequences that encode each protein or subunit. Alternatively, this may essentially be viewed as binding between two molecules or direct linkage, such as a fusion protein. In any event, the fusion protein may include a linker between the two subunits of interest (i.e. between the enzyme and the functional domain or between the adaptor protein and the functional domain). Thus, in some embodiments, the Cas effector protein or adaptor protein is associated with a functional domain by binding thereto. In other embodiments, the Cas effector protein or adaptor protein is associated with a functional domain because the two are fused together, optionally via an intermediate linker.

[0637] Attachment of a functional domain or fusion protein can be via a linker, e.g., a flexible glycine-serine (GlyGlyGlySer) (SEQ ID NO: 207) or (GGGS)3 (SEQ ID NO: 209) or a rigid alpha-helical linker such as (Ala(GluAlaAlaAlaLys)Ala) (SEQ ID NO: 209). Linkers such as (GGGGS)3 are preferably used herein to separate protein or peptide domains. (GGGGS)3 is preferable because it is a relatively long linker (15 amino acids). The glycine residues are the most flexible and the serine residues enhance the chance that the linker is on the outside of the protein. (GGGGS)₆ (GGGGS)₉ or (GGGGS)₁₂ may preferably be used as alternatives. Other preferred alternatives are (GGGGS)₁(SEQ ID NO: 210), (GGGGS)₂ SEQ ID NO: 211), (GGGGS)₄ SEQ ID NO: 212), (GGGGS)₅ SEQ ID NO: 213), (GGGGS)₇ SEQ ID NO: 214), (GGGGS)₈ SEQ ID NO: 215), (GGGGS)₁₀ SEQ ID NO: 216), or (GGGGS)₁₁ SEQ ID NO: 217). Alternative linkers are available, but highly flexible linkers are thought to work best to allow for maximum opportunity for the 2 parts of the Cas to come together and thus reconstitute Cas activity. One alternative is that the NLS of nucleoplasmin can be used as a linker. For example, a linker can also be used between the Cas and any functional domain. Again, a (GGGGS)₃ linker may be used here (or the 6, 9, or 12 repeat versions therefore) or the NLS of nucleoplasmin can be used as a linker between Cas and the functional domain.

### General Comments on Methods of Use of the Crispr System

[0638] In particular embodiments, the methods described herein may involve targeting one or more polynucleotide targets of interest. The polynucleotide targets of interest may be targets which are relevant to a specific disease or the treatment thereof, relevant for the generation of a given trait of interest or relevant for the production of a molecule of interest. When referring to the targeting of a “polynucleotide target” this may include targeting one or more of a coding regions, an intron, a promoter and any other 5′ or 3′ regulatory regions such as termination regions, ribosome binding sites, enhancers, silencers etc. The gene may encode any protein or RNA of interest. Accordingly, the target may be a coding region which can be transcribed into mRNA, tRNA or rRNA, but also recognition sites for proteins involved in replication, transcription and regulation thereof.

[0639] In particular embodiments, the methods described herein may involve targeting one or more genes of interest, wherein at least one gene of interest encodes a long noncoding RNA (lncRNA). While lncRNAs have been found to be critical for cellular functioning. As the lncRNAs that are essential have been found to differ for each cell type (C. P. Fulco et al., 2016, Science, doi:10.1126/science.aag2445; N. E. Sanjana et al., 2016, Science, doi: 10.1126/science.aaf8325), the methods provided herein may involve the step of determining the lncRNA that is relevant for cellular function for the cell of interest.

[0640] In an exemplary method for modifying a target polynucleotide by integrating an exogenous polynucleotide template, a double stranded break is introduced into the genome sequence by the CRISPR complex, the break is repaired via homologous recombination an exogenous polynucleotide template such that the template is integrated into the genome. The presence of a double-stranded break facilitates integration of the template.

[0641] In other embodiments, this invention provides a method of modifying expression of a polynucleotide in a eukaryotic cell. The method comprises increasing or decreasing expression of a target polynucleotide by using a CRISPR complex that binds to the polynucleotide.

[0642] In some methods, a target polynucleotide can be inactivated to effect the modification of the expression in a cell. For example, upon the binding of a CRISPR complex to a target sequence in a cell, the target polynucleotide is inactivated such that the sequence is not transcribed, the coded protein is not produced, or the sequence does not function as the wild-type sequence does. For example, a protein or microRNA coding sequence may be inactivated such that the protein is not produced.

[0643] In some methods, a control sequence can be inactivated such that it no longer functions as a control sequence. As used herein, “control sequence” refers to any nucleic acid sequence that effects the transcription, translation, or accessibility of a nucleic acid sequence. Examples of a control sequence include, a promoter, a transcription terminator, and an enhancer are control sequences. The inactivated target sequence may include a deletion mutation (i.e., deletion of one or more nucleotides), an insertion mutation (i.e., insertion of one or more nucleotides), or a nonsense mutation (i.e., substitution of a single nucleotide for another nucleotide such that a stop codon is introduced). In some methods, the inactivation of a target sequence results in “knockout” of the target sequence.

[0644] Also provided herein are methods of functional genomics which involve identifying cellular interactions by introducing multiple combinatorial perturbations and correlating observed genomic, genetic, proteomic, epigenetic and/or phenotypic effects with the perturbation detected in single cells, also referred to as “perturb-seq”. In one embodiment, these methods combine single-cell RNA sequencing (RNA-seq) and clustered regularly interspaced short palindromic repeats (CRISPR)-based perturbations (Dixit et al. 2016, Cell 167, 1853-1866; Adamson et al. 2016, Cell 167, 1867-1882). Generally, these methods involve introducing a number of combinatorial perturbations to a plurality of cells in a population of cells, wherein each cell in the plurality of the cells receives at least 1 perturbation, detecting genomic, genetic, proteomic, epigenetic and/or phenotypic differences in single cells compared to one or more cells that did not receive any perturbation, and detecting the perturbation(s) in single cells; and determining measured differences relevant to the perturbations by applying a model accounting for co-variates to the measured differences, whereby intercellular and/or intracellular networks or circuits are inferred. More particularly, the single cell sequencing comprises cell barcodes, whereby the cell-of-origin of each RNA is recorded. More particularly, the single cell sequencing comprises unique molecular identifiers (UMI), whereby the capture rate of the measured signals, such as transcript copy number or probe binding events, in a single cell is determined.

[0645] These methods can be used for combinatorial probing of cellular circuits, for dissecting cellular circuitry, for delineating molecular pathways, and/or for identifying relevant targets for therapeutics development. More particularly, these methods may be used to identify groups of cells based on their molecular profiling. Similarities in gene-expression profiles between organic (e.g. disease) and induced (e.g. by small molecule) states may identify clinically-effective therapies.

[0646] Accordingly, in particular embodiments, therapeutic methods provided herein comprise, determining, for a population of cells isolated from a subject, optimal therapeutic target and/or therapeutic, using perturb-seq as described above.

[0647] In particular embodiments, pertub-seq methods as referred to herein elsewhere are used to determine, in an isolated cell or cell line, cellular circuits which may affect production of a molecule of interest.

### Additional CRISPR-Cas Development and Use Considerations

[0648] The present invention may be further illustrated and extended based on aspects of CRISPR-Cas9 development and use as set forth in the following articles and particularly as relates to delivery of a CRISPR protein complex and uses of an RNA guided endonuclease in cells and organisms:
[0649] Multiplex genome engineering using CRISPR/Cas systems. Cong, L., Ran, F. A., Cox, D., Lin, S., Barretto, R., Habib, N., Hsu, P. D., Wu, X., Jiang, W., Marraffini, L. A., & Zhang, F. Science February 15; 339(6121):819-23 (2013);
[0650] RNA-guided editing of bacterial genomes using CRISPR-Cas systems. Jiang W., Bikard D., Cox D., Zhang F, Marraffini L A. Nat Biotechnol March; 31(3):233-9 (2013);
[0651] One-Step Generation of Mice Carrying Mutations in Multiple Genes by CRISPR/Cas-Mediated Genome Engineering. Wang H., Yang H., Shivalila C S., Dawlaty M M., Cheng A W., Zhang F., Jaenisch R. Cell May 9; 153(4):910-8 (2013);
[0652] Optical control of mammalian endogenous transcription and epigenetic states. Konermann S, Brigham M D, Trevino A E, Hsu P D, Heidenreich M, Cong L, Platt R J, Scott D A, Church G M, Zhang F. Nature. August 22; 500(7463):472-6. doi: 10.1038/Nature12466. Epub 2013 Aug. 23 (2013);
[0653] Double Nicking by RNA-Guided CRISPR Cas9 for Enhanced Genome Editing Specificity. Ran, F A., Hsu, P D., Lin, C Y., Gootenberg, J S., Konermann, S., Trevino, A E., Scott, D A., Inoue, A., Matoba, S., Zhang, Y., & Zhang, F. Cell August 28. pii: S0092-8674(13)01015-5 (2013-A);
[0654] DNA targeting specificity of RNA-guided Cas9 nucleases. Hsu, P., Scott, D., Weinstein, J., Ran, F A., Konermann, S., Agarwala, V., Li, Y., Fine, E., Wu, X., Shalem, O., Cradick, T J., Marraffini, L A., Bao, G., & Zhang, F. Nat Biotechnol doi:10.1038/nbt.2647 (2013);
[0655] Genome engineering using the CRISPR-Cas9 system. Ran, F A., Hsu, P D., Wright, J., Agarwala, V., Scott, D A., Zhang, F. Nature Protocols November; 8(11):2281-308 (2013-B);
[0656] Genome-Scale CRISPR-Cas9 Knockout Screening in Human Cells. Shalem, O., Sanjana, N E., Hartenian, E., Shi, X., Scott, D A., Mikkelson, T., Heckl, D., Ebert, B L., Root, D E., Doench, J G., Zhang, F. Science December 12. (2013). [Epub ahead of print];
[0657] Crystal structure of cas9 in complex with guide RNA and target DNA. Nishimasu, H., Ran, F A., Hsu, P D., Konermann, S., Shehata, S I., Dohmae, N., Ishitani, R., Zhang, F., Nureki, O. Cell February 27, 156(5):935-49 (2014);
[0658] Genome-wide binding of the CRISPR endonuclease Cas9 in mammalian cells. Wu X., Scott D A., Kriz A J., Chiu A C., Hsu P D., Dadon D B., Cheng A W., Trevino A E., Konermann S., Chen S., Jaenisch R., Zhang F., Sharp P A. Nat Biotechnol. April 20. doi: 10.1038/nbt.2889 (2014);
[0659] CRISPR-Cas9 Knockin Mice for Genome Editing and Cancer Modeling. Platt R J, Chen S, Zhou Y, Yim M J, Swiech L, Kempton H R, Dahlman J E, Parnas O, Eisenhaure T M, Jovanovic M, Graham D B, Jhunjhunwala S, Heidenreich M, Xavier R J, Langer R, Anderson D G, Hacohen N, Regev A, Feng G, Sharp P A, Zhang F. Cell 159(2): 440-455 DOI: 10.1016/j.cell.2014.09.014(2014);
[0660] Development and Applications of CRISPR-Cas9 for Genome Engineering, Hsu P D, Lander E S, Zhang F., Cell. June 5; 157(6):1262-78 (2014).
[0661] Genetic screens in human cells using the CRISPR/Cas9 system, Wang T, Wei J J, Sabatini D M, Lander E S., Science. January 3; 343(6166): 80-84. doi:10.1126/science.1246981 (2014);
[0662] Rational design of highly active sgRNAs for CRISPR-Cas9-mediated gene inactivation, Doench J G, Hartenian E, Graham D B, Tothova Z, Hegde M, Smith I, Sullender M, Ebert B L, Xavier R J, Root D E., (published online 3 Sep. 2014) Nat Biotechnol. December; 32(12):1262-7 (2014);
[0663] In vivo interrogation of gene function in the mammalian brain using CRISPR-Cas9, Swiech L, Heidenreich M, Banerjee A, Habib N, Li Y, Trombetta J, Sur M, Zhang F., (published online 19 Oct. 2014) Nat Biotechnol. January; 33(1):102-6 (2015);
[0664] Genome-scale transcriptional activation by an engineered CRISPR-Cas9 complex, Konermann S, Brigham M D, Trevino A E, Joung J, Abudayyeh O O, Barcena C, Hsu P D, Habib N, Gootenberg J S, Nishimasu H, Nureki O, Zhang F., Nature. January 29; 517(7536):583-8 (2015).
[0665] A split-Cas9 architecture for inducible genome editing and transcription modulation, Zetsche B, Volz S E, Zhang F., (published online 2 Feb. 2015) Nat Biotechnol. February; 33(2):139-42 (2015);
[0666] Genome-wide CRISPR Screen in a Mouse Model of Tumor Growth and Metastasis, Chen S, Sanjana N E, Zheng K, Shalem O, Lee K, Shi X, Scott D A, Song J, Pan J Q, Weissleder R, Lee H, Zhang F, Sharp P A. Cell 160, 1246-1260, Mar. 12, 2015 (multiplex screen in mouse), and
[0667] In vivo genome editing using Staphylococcus aureus Cas9, Ran F A, Cong L, Yan W X, Scott D A, Gootenberg J S, Kriz A J, Zetsche B, Shalem O, Wu X, Makarova K S, Koonin E V, Sharp P A, Zhang F., (published online 1 Apr. 2015), Nature. April 9; 520(7546):186-91 (2015).
[0668] Shalem et al., “High-throughput functional genomics using CRISPR-Cas9,” Nature Reviews Genetics 16, 299-311 (May 2015).
[0669] Xu et al., “Sequence determinants of improved CRISPR sgRNA design,” Genome Research 25, 1147-1157 (August 2015).
[0670] Parnas et al., “A Genome-wide CRISPR Screen in Primary Immune Cells to Dissect Regulatory Networks,” Cell 162, 675-686 (Jul. 30, 2015).
[0671] Ramanan et al., CRISPR/Cas9 cleavage of viral DNA efficiently suppresses hepatitis B virus,” Scientific Reports 5:10833. doi: 10.1038/srep10833 (Jun. 2, 2015)
[0672] Nishimasu et al., Crystal Structure of Staphylococcus aureus Cas9,” Cell 162, 1113-1126 (Aug. 27, 2015)
[0673] BCL11A enhancer dissection by Cas9-mediated in situ saturating mutagenesis, Canver et al., Nature 527(7577):192-7 (Nov. 12, 2015) doi: 10.1038/naturel5521. Epub 2015 Sep. 16.
[0674] Cpf1 Is a Single RNA-Guided Endonuclease of a Class 2 CRISPR-Cas System, Zetsche et al., Cell 163, 759-71 (Sep. 25, 2015).
[0675] Discovery and Functional Characterization of Diverse Class 2 CRISPR-Cas Systems, Shmakov et al., Molecular Cell, 60(3), 385-397 doi: 10.1016/j.molcel.2015.10.008 Epub Oct. 22, 2015.
[0676] Rationally engineered Cas9 nucleases with improved specificity, Slaymaker et al., Science 2016 Jan. 1 351(6268): 84-88 doi: 10.1126/science.aad5227. Epub 2015 Dec. 1. [Epub ahead of print].
[0677] Gao et al, “Engineered Cpf1 Enzymes with Altered PAM Specificities,” bioRxiv 091611; doi: dx.doi.org/10.1101/091611 (Dec. 4, 2016)
   each of which is incorporated herein by reference, may be considered in the practice of the instant invention, and discussed briefly below:
[0678] Cong et al. engineered type II CRISPR-Cas systems for use in eukaryotic cells based on both Streptococcus thermophilus Cas9 and also Streptococcus pyogenes Cas9 and demonstrated that Cas9 nucleases can be directed by short RNAs to induce precise cleavage of DNA in human and mouse cells. Their study further showed that Cas9 as converted into a nicking enzyme can be used to facilitate homology-directed repair in eukaryotic cells with minimal mutagenic activity. Additionally, their study demonstrated that multiple guide sequences can be encoded into a single CRISPR array to enable simultaneous editing of several at endogenous genomic loci sites within the mammalian genome, demonstrating easy programmability and wide applicability of the RNA-guided nuclease technology. This ability to use RNA to program sequence specific DNA cleavage in cells defined a new class of genome engineering tools. These studies further showed that other CRISPR loci are likely to be transplantable into mammalian cells and can also mediate mammalian genome cleavage. Importantly, it can be envisaged that several aspects of the CRISPR-Cas system can be further improved to increase its efficiency and versatility.
[0679] Jiang et al. used the clustered, regularly interspaced, short palindromic repeats (CRISPR)-associated Cas9 endonuclease complexed with dual-RNAs to introduce precise mutations in the genomes of Streptococcus pneumoniae and Escherichia coli. The approach relied on dual-RNA:Cas9-directed cleavage at the targeted genomic site to kill unmutated cells and circumvents the need for selectable markers or counter-selection systems. The study reported reprogramming dual-RNA:Cas9 specificity by changing the sequence of short CRISPR RNA (crRNA) to make single- and multinucleotide changes carried on editing templates. The study showed that simultaneous use of two crRNAs enabled multiplex mutagenesis. Furthermore, when the approach was used in combination with recombineering, in S. pneumoniae, nearly 100% of cells that were recovered using the described approach contained the desired mutation, and in E. coli, 65% that were recovered contained the mutation.
[0680] Wang et al. (2013) used the CRISPR-Cas system for the one-step generation of mice carrying mutations in multiple genes which were traditionally generated in multiple steps by sequential recombination in embryonic stem cells and/or time-consuming intercrossing of mice with a single mutation. The CRISPR-Cas system will greatly accelerate the in vivo study of functionally redundant genes and of epistatic gene interactions.
[0681] Konermann et al. (2013) addressed the need in the art for versatile and robust technologies that enable optical and chemical modulation of DNA-binding domains based CRISPR Cas9 enzyme and also Transcriptional Activator Like Effectors
[0682] Ran et al. (2013-A) described an approach that combined a Cas9 nickase mutant with paired guide RNAs to introduce targeted double-strand breaks. This addresses the issue of the Cas9 nuclease from the microbial CRISPR-Cas system being targeted to specific genomic loci by a guide sequence, which can tolerate certain mismatches to the DNA target and thereby promote undesired off-target mutagenesis. Because individual nicks in the genome are repaired with high fidelity, simultaneous nicking via appropriately offset guide RNAs is required for double-stranded breaks and extends the number of specifically recognized bases for target cleavage. The authors demonstrated that using paired nicking can reduce off-target activity by 50- to 1,500-fold in cell lines and to facilitate gene knockout in mouse zygotes without sacrificing on-target cleavage efficiency. This versatile strategy enables a wide variety of genome editing applications that require high specificity.
[0683] Hsu et al. (2013) characterized SpCas9 targeting specificity in human cells to inform the selection of target sites and avoid off-target effects. The study evaluated >700 guide RNA variants and SpCas9-induced indel mutation levels at >100 predicted genomic off-target loci in 293T and 293FT cells. The authors that SpCas9 tolerates mismatches between guide RNA and target DNA at different positions in a sequence-dependent manner, sensitive to the number, position and distribution of mismatches. The authors further showed that SpCas9-mediated cleavage is unaffected by DNA methylation and that the dosage of SpCas9 and gRNA can be titrated to minimize off-target modification. Additionally, to facilitate mammalian genome engineering applications, the authors reported providing a web-based software tool to guide the selection and validation of target sequences as well as off-target analyses.
[0684] Ran et al. (2013-B) described a set of tools for Cas9-mediated genome editing via non-homologous end joining (NHEJ) or homology-directed repair (HDR) in mammalian cells, as well as generation of modified cell lines for downstream functional studies. To minimize off-target cleavage, the authors further described a double-nicking strategy using the Cas9 nickase mutant with paired guide RNAs. The protocol provided by the authors experimentally derived guidelines for the selection of target sites, evaluation of cleavage efficiency and analysis of off-target activity. The studies showed that beginning with target design, gene modifications can be achieved within as little as 1-2 weeks, and modified clonal cell lines can be derived within 2-3 weeks.
[0685] Shalem et al. described a new way to interrogate gene function on a genome-wide scale. Their studies showed that delivery of a genome-scale CRISPR-Cas9 knockout (GeCKO) library targeted 18,080 genes with 64,751 unique guide sequences enabled both negative and positive selection screening in human cells. First, the authors showed use of the GeCKO library to identify genes essential for cell viability in cancer and pluripotent stem cells. Next, in a melanoma model, the authors screened for genes whose loss is involved in resistance to vemurafenib, a therapeutic that inhibits mutant protein kinase BRAF. Their studies showed that the highest-ranking candidates included previously validated genes NF1 and MED12 as well as novel hits NF2, CUL3, TADA2B, and TADA1. The authors observed a high level of consistency between independent guide RNAs targeting the same gene and a high rate of hit confirmation, and thus demonstrated the promise of genome-scale screening with Cas9.
[0686] Nishimasu et al. reported the crystal structure of Streptococcus pyogenes Cas9 in complex with sgRNA and its target DNA at 2.5 A° resolution. The structure revealed a bilobed architecture composed of target recognition and nuclease lobes, accommodating the sgRNA:DNA heteroduplex in a positively charged groove at their interface. Whereas the recognition lobe is essential for binding sgRNA and DNA, the nuclease lobe contains the HNH and RuvC nuclease domains, which are properly positioned for cleavage of the complementary and non-complementary strands of the target DNA, respectively. The nuclease lobe also contains a carboxyl-terminal domain responsible for the interaction with the protospacer adjacent motif (PAM). This high-resolution structure and accompanying functional analyses have revealed the molecular mechanism of RNA-guided DNA targeting by Cas9, thus paving the way for the rational design of new, versatile genome-editing technologies.
[0687] Wu et al. mapped genome-wide binding sites of a catalytically inactive Cas9 (dCas9) from Streptococcus pyogenes loaded with single guide RNAs (sgRNAs) in mouse embryonic stem cells (mESCs). The authors showed that each of the four sgRNAs tested targets dCas9 to between tens and thousands of genomic sites, frequently characterized by a 5-nucleotide seed region in the sgRNA and an NGG protospacer adjacent motif (PAM). Chromatin inaccessibility decreases dCas9 binding to other sites with matching seed sequences; thus 70% of off-target sites are associated with genes. The authors showed that targeted sequencing of 295 dCas9 binding sites in mESCs transfected with catalytically active Cas9 identified only one site mutated above background levels. The authors proposed a two-state model for Cas9 binding and cleavage, in which a seed match triggers binding but extensive pairing with target DNA is required for cleavage.
[0688] Platt et al. established a Cre-dependent Cas9 knockin mouse. The authors demonstrated in vivo as well as ex vivo genome editing using adeno-associated virus (AAV)-, lentivirus-, or particle-mediated delivery of guide RNA in neurons, immune cells, and endothelial cells.
[0689] Hsu et al. (2014) is a review article that discusses generally CRISPR-Cas9 history from yogurt to genome editing, including genetic screening of cells.
[0690] Wang et al. (2014) relates to a pooled, loss-of-function genetic screening approach suitable for both positive and negative selection that uses a genome-scale lentiviral single guide RNA (sgRNA) library.
[0691] Doench et al. created a pool of sgRNAs, tiling across all possible target sites of a panel of six endogenous mouse and three endogenous human genes and quantitatively assessed their ability to produce null alleles of their target gene by antibody staining and flow cytometry. The authors showed that optimization of the PAM improved activity and also provided an on-line tool for designing sgRNAs.
[0692] Swiech et al. demonstrate that AAV-mediated SpCas9 genome editing can enable reverse genetic studies of gene function in the brain.
[0693] Konermann et al. (2015) discusses the ability to attach multiple effector domains, e.g., transcriptional activator, functional and epigenomic regulators at appropriate positions on the guide such as stem or tetraloop with and without linkers.
[0694] Zetsche et al. demonstrates that the Cas9 enzyme can be split into two and hence the assembly of Cas9 for activation can be controlled.
[0695] Chen et al. relates to multiplex screening by demonstrating that a genome-wide in vivo CRISPR-Cas9 screen in mice reveals genes regulating lung metastasis.
[0696] Ran et al. (2015) relates to SaCas9 and its ability to edit genomes and demonstrates that one cannot extrapolate from biochemical assays.
[0697] Shalem et al. (2015) described ways in which catalytically inactive Cas9 (dCas9) fusions are used to synthetically repress (CRISPRi) or activate (CRISPRa) expression, showing. advances using Cas9 for genome-scale screens, including arrayed and pooled screens, knockout approaches that inactivate genomic loci and strategies that modulate transcriptional activity.
[0698] Xu et al. (2015) assessed the DNA sequence features that contribute to single guide RNA (sgRNA) efficiency in CRISPR-based screens. The authors explored efficiency of CRISPR/Cas9 knockout and nucleotide preference at the cleavage site. The authors also found that the sequence preference for CRISPRi/a is substantially different from that for CRISPR/Cas9 knockout.
[0699] Parnas et al. (2015) introduced genome-wide pooled CRISPR-Cas9 libraries into dendritic cells (DCs) to identify genes that control the induction of tumor necrosis factor (Tnf) by bacterial lipopolysaccharide (LPS). Known regulators of Tlr4 signaling and previously unknown candidates were identified and classified into three functional modules with distinct effects on the canonical responses to LPS.
[0700] Ramanan et al (2015) demonstrated cleavage of viral episomal DNA (cccDNA) in infected cells. The HBV genome exists in the nuclei of infected hepatocytes as a 3.2 kb double-stranded episomal DNA species called covalently closed circular DNA (cccDNA), which is a key component in the HBV life cycle whose replication is not inhibited by current therapies. The authors showed that sgRNAs specifically targeting highly conserved regions of HBV robustly suppresses viral replication and depleted cccDNA.
[0701] Nishimasu et al. (2015) reported the crystal structures of SaCas9 in complex with a single guide RNA (sgRNA) and its double-stranded DNA targets, containing the 5′-TTGAAT-3′ PAM and the 5′-TTGGGT-3′ PAM. A structural comparison of SaCas9 with SpCas9 highlighted both structural conservation and divergence, explaining their distinct PAM specificities and orthologous sgRNA recognition.
[0702] Canver et al. (2015) demonstrated a CRISPR-Cas9-based functional investigation of non-coding genomic elements. The authors we developed pooled CRISPR-Cas9 guide RNA libraries to perform in situ saturating mutagenesis of the human and mouse BCL11A enhancers which revealed critical features of the enhancers.
[0703] Zetsche et al. (2015) reported characterization of Cpf1, a class 2 CRISPR nuclease from Francisella novicida U112 having features distinct from Cas9. Cpf1 is a single RNA-guided endonuclease lacking tracrRNA, utilizes a T-rich protospacer-adjacent motif, and cleaves DNA via a staggered DNA double-stranded break.
[0704] Shmakov et al. (2015) reported three distinct Class 2 CRISPR-Cas systems. Two system CRISPR enzymes (C2c1 and C2c3) contain RuvC-like endonuclease domains distantly related to Cpf1. Unlike Cpf1, C2c1 depends on both crRNA and tracrRNA for DNA cleavage. The third enzyme (C2c2) contains two predicted HEPN RNase domains and is tracrRNA independent.
[0705] Slaymaker et al (2016) reported the use of structure-guided protein engineering to improve the specificity of Streptococcus pyogenes Cas9 (SpCas9). The authors developed “enhanced specificity” SpCas9 (eSpCas9) variants which maintained robust on-target cleavage with reduced off-target effects.

[0706] The methods and tools provided herein are exemplified for Cas. Orthologs of Cas have been identified in different bacterial species as described herein. Further type II nucleases with similar properties can be identified using methods described in the art (Shmakov et al. 2015, 60:385-397; Abudayeh et al. 2016, Science, 5; 353(6299)). In particular embodiments, such methods for identifying novel CRISPR effector proteins may comprise the steps of selecting sequences from the database encoding a seed which identifies the presence of a CRISPR Cas locus, identifying loci located within 10 kb of the seed comprising Open Reading Frames (ORFs) in the selected sequences, selecting therefrom loci comprising ORFs of which only a single ORF encodes a novel CRISPR effector having greater than 700 amino acids and no more than 90% homology to a known CRISPR effector. In particular embodiments, the seed is a protein that is common to the CRISPR-Cas system, such as Cas1. In further embodiments, the CRISPR array is used as a seed to identify new effector proteins.

[0707] The effectiveness of the present invention has been demonstrated. Preassembled recombinant CRISPR-Cas complexes comprising Cas and crRNA may be transfected, for example by electroporation, resulting in high mutation rates and absence of detectable off-target mutations. Hur, J. K. et al, Targeted mutagenesis in mice by electroporation of Cas ribonucleoproteins, Nat Biotechnol. 2016 Jun. 6. doi: 10.1038/nbt.3596. Genome-wide analyses shows that Cas is highly specific. By one measure, in vitro cleavage sites determined for SpCas9 in human HEK293T cells were significantly fewer that for SpCas9. Kim, D. et al., Genome-wide analysis reveals specificities of Cas endonucleases in human cells, Nat Biotechnol. 2016 Jun. 6. doi: 10.1038/nbt.3609. [An efficient multiplexed system employing Cas has been demonstrated in Drosophila employing gRNAs processed from an array containing inventing tRNAs. Port, F. et al, Expansion of the CRISPR toolbox in an animal with tRNA-flanked Cas9 and Cas gRNAs. doi: dx.doi.org/10.1101/046417.

[0708] Also, “Dimeric CRISPR RNA-guided FokI nucleases for highly specific genome editing”, Shengdar Q. Tsai, Nicolas Wyvekens, Cyd Khayter, Jennifer A. Foden, Vishal Thapar, Deepak Reyon, Mathew J. Goodwin, Martin J. Aryee, J. Keith Joung Nature Biotechnology 32(6): 569-77 (2014), relates to dimeric RNA-guided FokI Nucleases that recognize extended sequences and can edit endogenous genes with high efficiencies in human cells.

[0709] With respect to general information on CRISPR-Cas Systems, components thereof, and delivery of such components, including methods, materials, delivery vehicles, vectors, particles, AAV, and making and using thereof, including as to amounts and formulations, all useful in the practice of the instant invention, reference is made to: U.S. Pat. Nos. 8,697,359, 8,771,945, 8,795,965, 8,865,406, 8,871,445, 8,889,356, 8,889,418, 8,895,308, 8,906,616, 8,932,814, 8,945,839, 8,993,233 and 8,999,641; US Patent Publications US 2014-0310830 (U.S. application Ser. No. 14/105,031), US 2014-0287938 A1 (U.S. application Ser. No. 14/213,991), US 2014-0273234 A1 (U.S. application Ser. No. 14/293,674), US2014-0273232 A1 (U.S. application Ser. No. 14/290,575), US 2014-0273231 (U.S. application Ser. No. 14/259,420), US 2014-0256046 A1 (U.S. application Ser. No. 14/226,274), US 2014-0248702 A1 (U.S. application Ser. No. 14/258,458), US 2014-0242700 A1 (U.S. application Ser. No. 14/222,930), US 2014-0242699 A1 (U.S. application Ser. No. 14/183,512), US 2014-0242664 A1 (U.S. application Ser. No. 14/104,990), US 2014-0234972 A1 (U.S. application Ser. No. 14/183,471), US 2014-0227787 A1 (U.S. application Ser. No. 14/256,912), US 2014-0189896 A1 (U.S. application Ser. No. 14/105,035), US 2014-0186958 (U.S. application Ser. No. 14/105,017), US 2014-0186919 A1 (U.S. application Ser. No. 14/104,977), US 2014-0186843 A1 (U.S. application Ser. No. 14/104,900), US 2014-0179770 A1 (U.S. application Ser. No. 14/104,837) and US 2014-0179006 A1 (U.S. application Ser. No. 14/183,486), US 2014-0170753 (U.S. application Ser. No. 14/183,429); US 2015-0184139 (U.S. application Ser. No. 14/324,960); Ser. No. 14/054,414 European Patent Applications EP 2 771 468 (EP13818570.7), EP 2 764 103 (EP13824232.6), and EP 2 784 162 (EP14170383.5); and PCT Patent Publications WO 2014/093661 (PCT/US2013/074743), WO 2014/093694 (PCT/US2013/074790), WO 2014/093595 (PCT/US2013/074611), WO 2014/093718 (PCT/US2013/074825), WO 2014/093709 (PCT/US2013/074812), WO 2014/093622 (PCT/US2013/074667), WO 2014/093635 (PCT/US2013/074691), WO 2014/093655 (PCT/US2013/074736), WO 2014/093712 (PCT/US2013/074819), WO 2014/093701 (PCT/US2013/074800), WO 2014/018423 (PCT/US2013/051418), WO 2014/204723 (PCT/US2014/041790), WO 2014/204724 (PCT/US2014/041800), WO 2014/204725 (PCT/US2014/041803), WO 2014/204726 (PCT/US2014/041804), WO 2014/204727 (PCT/US2014/041806), WO 2014/204728 (PCT/US2014/041808), WO 2014/204729 (PCT/US2014/041809), WO 2015/089351 (PCT/US2014/069897), WO 2015/089354 (PCT/US2014/069902), WO 2015/089364 (PCT/US2014/069925), WO 2015/089427 (PCT/US2014/070068), WO 2015/089462 (PCT/US2014/070127), WO 2015/089419 (PCT/US2014/070057), WO 2015/089465 (PCT/US2014/070135), WO 2015/089486 (PCT/US2014/070175), PCT/US2015/051691, PCT/US2015/051830. Reference is also made to U.S. provisional patent applications 61/758,468; 61/802,174; 61/806,375; 61/814,263; 61/819,803 and 61/828,130, filed on Jan. 30, 2013; Mar. 15, 2013; Mar. 28, 2013; Apr. 20, 2013; May 6, 2013 and May 28, 2013 respectively. Reference is also made to U.S. provisional patent application 61/836,123, filed on Jun. 17, 2013. Reference is additionally made to U.S. provisional patent applications 61/835,931, 61/835,936, 61/835,973, 61/836,080, 61/836,101, and 61/836,127, each filed Jun. 17, 2013. Further reference is made to U.S. provisional patent applications 61/862,468 and 61/862,355 filed on Aug. 5, 2013; 61/871,301 filed on Aug. 28, 2013; 61/960,777 filed on Sep. 25, 2013 and 61/961,980 filed on Oct. 28, 2013. Reference is yet further made to: PCT/US2014/62558 filed Oct. 28, 2014, and U.S. Provisional Patent Application Ser. Nos. 61/915,148, 61/915,150, 61/915,153, 61/915,203, 61/915,251, 61/915,301, 61/915,267, 61/915,260, and 61/915,397, each filed Dec. 12, 2013; 61/757,972 and 61/768,959, filed on Jan. 29, 2013 and Feb. 25, 2013; 62/010,888 and 62/010,879, both filed Jun. 11, 2014; 62/010,329, 62/010,439 and 62/010,441, each filed Jun. 10, 2014; 61/939,228 and 61/939,242, each filed Feb. 12, 2014; 61/980,012, filed Apr. 15, 2014; 62/038,358, filed Aug. 17, 2014; 62/055,484, 62/055,460 and 62/055,487, each filed Sep. 25, 2014; and 62/069,243, filed Oct. 27, 2014. Reference is made to PCT application designating, inter alia, the United States, application No. PCT/US14/41806, filed Jun. 10, 2014. Reference is made to U.S. provisional patent application 61/930,214 filed on Jan. 22, 2014. Reference is made to PCT application designating, inter alia, the United States, application No. PCT/US14/41806, filed Jun. 10, 2014.

[0710] Mention is also made of U.S. application 62/180,709, 17 Jun. 2015, PROTECTED GUIDE RNAS (PGRNAS); U.S. application 62/091,455, filed, 12 Dec. 2014, PROTECTED GUIDE RNAS (PGRNAS); U.S. application 62/096,708, 24 Dec. 2014, PROTECTED GUIDE RNAS (PGRNAS); U.S. applications 62/091,462, 12 Dec. 2014, 62/096,324, 23 Dec. 2014, 62/180,681, 17 Jun. 2015, and 62/237,496, 5 Oct. 2015, DEAD GUIDES FOR CRISPR TRANSCRIPTION FACTORS; U.S. application 62/091,456, 12 Dec. 2014 and 62/180,692, 17 Jun. 2015, ESCORTED AND FUNCTIONALIZED GUIDES FOR CRISPR-CAS SYSTEMS; U.S. application 62/091,461, 12 Dec. 2014, DELIVERY, USE AND THERAPEUTIC APPLICATIONS OF THE CRISPR-CAS SYSTEMS AND COMPOSITIONS FOR GENOME EDITING AS TO HEMATOPOETIC STEM CELLS (HSCs); U.S. application 62/094,903, 19 Dec. 2014, UNBIASED IDENTIFICATION OF DOUBLE-STRAND BREAKS AND GENOMIC REARRANGEMENT BY GENOME-WISE INSERT CAPTURE SEQUENCING; U.S. application 62/096,761, 24 Dec. 2014, ENGINEERING OF SYSTEMS, METHODS AND OPTIMIZED ENZYME AND GUIDE SCAFFOLDS FOR SEQUENCE MANIPULATION; U.S. application 62/098,059, 30 Dec. 2014, 62/181,641, 18 Jun. 2015, and 62/181,667, 18 Jun. 2015, RNA-TARGETING SYSTEM; U.S. application 62/096,656, 24 Dec. 2014 and 62/181,151, 17 Jun. 2015, CRISPR HAVING OR ASSOCIATED WITH DESTABILIZATION DOMAINS; U.S. application 62/096,697, 24 Dec. 2014, CRISPR HAVING OR ASSOCIATED WITH AAV; U.S. application 62/098,158, 30 Dec. 2014, ENGINEERED CRISPR COMPLEX INSERTIONAL TARGETING SYSTEMS; U.S. application 62/151,052, 22 Apr. 2015, CELLULAR TARGETING FOR EXTRACELLULAR EXOSOMAL REPORTING; U.S. application 62/054,490, 24 Sep. 2014, DELIVERY, USE AND THERAPEUTIC APPLICATIONS OF THE CRISPR-CAS SYSTEMS AND COMPOSITIONS FOR TARGETING DISORDERS AND DISEASES USING PARTICLE DELIVERY COMPONENTS; U.S. application 61/939,154, 12 Feb. 2014, SYSTEMS, METHODS AND COMPOSITIONS FOR SEQUENCE MANIPULATION WITH OPTIMIZED FUNCTIONAL CRISPR-CAS SYSTEMS; U.S. application 62/055,484, 25 Sep. 2014, SYSTEMS, METHODS AND COMPOSITIONS FOR SEQUENCE MANIPULATION WITH OPTIMIZED FUNCTIONAL CRISPR-CAS SYSTEMS; U.S. application 62/087,537, 4 Dec. 2014, SYSTEMS, METHODS AND COMPOSITIONS FOR SEQUENCE MANIPULATION WITH OPTIMIZED FUNCTIONAL CRISPR-CAS SYSTEMS; U.S. application 62/054,651, 24 Sep. 2014, DELIVERY, USE AND THERAPEUTIC APPLICATIONS OF THE CRISPR-CAS SYSTEMS AND COMPOSITIONS FOR MODELING COMPETITION OF MULTIPLE CANCER MUTATIONS IN VIVO; U.S. application 62/067,886, 23 Oct. 2014, DELIVERY, USE AND THERAPEUTIC APPLICATIONS OF THE CRISPR-CAS SYSTEMS AND COMPOSITIONS FOR MODELING COMPETITION OF MULTIPLE CANCER MUTATIONS IN VIVO; U.S. applications 62/054,675, 24 Sep. 2014 and 62/181,002, 17 Jun. 2015, DELIVERY, USE AND THERAPEUTIC APPLICATIONS OF THE CRISPR-CAS SYSTEMS AND COMPOSITIONS IN NEURONAL CELLS/TISSUES; U.S. application 62/054,528, 24 Sep. 2014, DELIVERY, USE AND THERAPEUTIC APPLICATIONS OF THE CRISPR-CAS SYSTEMS AND COMPOSITIONS IN IMMUNE DISEASES OR DISORDERS; U.S. application 62/055,454, 25 Sep. 2014, DELIVERY, USE AND THERAPEUTIC APPLICATIONS OF THE CRISPR-CAS SYSTEMS AND COMPOSITIONS FOR TARGETING DISORDERS AND DISEASES USING CELL PENETRATION PEPTIDES (CPP); U.S. application 62/055,460, 25 Sep. 2014, MULTIFUNCTIONAL-CRISPR COMPLEXES AND/OR OPTIMIZED ENZYME LINKED FUNCTIONAL-CRISPR COMPLEXES; U.S. application 62/087,475, 4 Dec. 2014 and 62/181,690, 18 Jun. 2015, FUNCTIONAL SCREENING WITH OPTIMIZED FUNCTIONAL CRISPR-CAS SYSTEMS; U.S. application 62/055,487, 25 Sep. 2014, FUNCTIONAL SCREENING WITH OPTIMIZED FUNCTIONAL CRISPR-CAS SYSTEMS; U.S. application 62/087,546, 4 Dec. 2014 and 62/181,687, 18 Jun. 2015, MULTIFUNCTIONAL CRISPR COMPLEXES AND/OR OPTIMIZED ENZYME LINKED FUNCTIONAL-CRISPR COMPLEXES; and U.S. application 62/098,285, 30 Dec. 2014, CRISPR MEDIATED IN VIVO MODELING AND GENETIC SCREENING OF TUMOR GROWTH AND METASTASIS.

[0711] Mention is made of U.S. applications 62/181,659, 18 Jun. 2015 and 62/207,318, 19 Aug. 2015, ENGINEERING AND OPTIMIZATION OF SYSTEMS, METHODS, ENZYME AND GUIDE SCAFFOLDS OF CAS9 ORTHOLOGS AND VARIANTS FOR SEQUENCE MANIPULATION. Mention is made of U.S. applications 62/181,663, 18 Jun. 2015 and 62/245,264, 22 Oct. 2015, NOVEL CRISPR ENZYMES AND SYSTEMS, U.S. applications 62/181,675, 18 Jun. 2015, 62/285,349, 22 Oct. 2015, 62/296,522, 17 Feb. 2016, and 62/320,231, 8 Apr. 2016, NOVEL CRISPR ENZYMES AND SYSTEMS, U.S. application 62/232,067, 24 Sep. 2015, U.S. application Ser. No. 14/975,085, 18 Dec. 2015, European application No. 16150428.7, U.S. application 62/205,733, 16 Aug. 2015, U.S. application 62/201,542, 5 Aug. 2015, U.S. application 62/193,507, 16 Jul. 2015, and U.S. application 62/181,739, 18 Jun. 2015, each entitled NOVEL CRISPR ENZYMES AND SYSTEMS and of U.S. application 62/245,270, 22 Oct. 2015, NOVEL CRISPR ENZYMES AND SYSTEMS. Mention is also made of U.S. application 61/939,256, 12 Feb. 2014, and WO 2015/089473 (PCT/US2014/070152), 12 Dec. 2014, each entitled ENGINEERING OF SYSTEMS, METHODS AND OPTIMIZED GUIDE COMPOSITIONS WITH NEW ARCHITECTURES FOR SEQUENCE MANIPULATION. Mention is also made of PCT/US2015/045504, 15 Aug. 2015, U.S. application 62/180,699, 17 Jun. 2015, and U.S. application 62/038,358, 17 Aug. 2014, each entitled GENOME EDITING USING CAS9 NICKASES.

[0712] In addition, mention is made of PCT application PCT/US14/70057, Attorney Reference 47627.99.2060 and BI-2013/107 entitled “DELIVERY, USE AND THERAPEUTIC APPLICATIONS OF THE CRISPR-CAS SYSTEMS AND COMPOSITIONS FOR TARGETING DISORDERS AND DISEASES USING PARTICLE DELIVERY COMPONENTS (claiming priority from one or more or all of US provisional patent applications: 62/054,490, filed Sep. 24, 2014; 62/010,441, filed Jun. 10, 2014; and 61/915,118, 61/915,215 and 61/915,148, each filed on Dec. 12, 2013) (“the Particle Delivery PCT”), incorporated herein by reference, and of PCT application PCT/US14/70127, Attorney Reference 47627.99.2091 and BI-2013/101 entitled “DELIVERY, USE AND THERAPEUTIC APPLICATIONS OF THE CRISPR-CAS SYSTEMS AND COMPOSITIONS FOR GENOME EDITING “(claiming priority from one or more or all of US provisional patent applications: 61/915,176; 61/915,192; 61/915,215; 61/915,107, 61/915,145; 61/915,148; and 61/915,153 each filed Dec. 12, 2013) (“the Eye PCT”), incorporated herein by reference, with respect to a method of preparing an sgRNA-and-Cpf1 protein containing particle comprising admixing a mixture comprising an sgRNA and Cpf1 protein (and optionally HDR template) with a mixture comprising or consisting essentially of or consisting of surfactant, phospholipid, biodegradable polymer, lipoprotein and alcohol; and particles from such a process. For example, wherein Cpf1 protein and sgRNA were mixed together at a suitable, e.g., 3:1 to 1:3 or 2:1 to 1:2 or 1:1 molar ratio, at a suitable temperature, e.g., 15-30C, e.g., 20-25C, e.g., room temperature, for a suitable time, e.g., 15-45, such as 30 minutes, advantageously in sterile, nuclease free buffer, e.g., 1×PBS. Separately, particle components such as or comprising: a surfactant, e.g., cationic lipid, e.g., 1,2-dioleoyl-3-trimethylammonium-propane (DOTAP); phospholipid, e.g., dimyristoylphosphatidylcholine (DMPC); biodegradable polymer, such as an ethylene-glycol polymer or PEG, and a lipoprotein, such as a low-density lipoprotein, e.g., cholesterol were dissolved in an alcohol, advantageously a C1-6 alkyl alcohol, such as methanol, ethanol, isopropanol, e.g., 100% ethanol. The two solutions were mixed together to form particles containing the Cas9-sgRNA complexes. Accordingly, sgRNA may be pre-complexed with the Cpf1 protein, before formulating the entire complex in a particle. Formulations may be made with a different molar ratio of different components known to promote delivery of nucleic acids into cells (e.g. 1,2-dioleoyl-3-trimethylammonium-propane (DOTAP), 1,2-ditetradecanoyl-sn-glycero-3-phosphocholine (DMPC), polyethylene glycol (PEG), and cholesterol) For example DOTAP:DMPC:PEG:Cholesterol Molar Ratios may be DOTAP 100, DMPC 0, PEG 0, Cholesterol 0; or DOTAP 90, DMPC 0, PEG 10, Cholesterol 0; or DOTAP 90, DMPC 0, PEG 5, Cholesterol 5. DOTAP 100, DMPC 0, PEG 0, Cholesterol 0. That application accordingly comprehends admixing sgRNA, Cas protein and components that form a particle; as well as particles from such admixing. Aspects of the instant invention can involve particles; for example, particles using a process analogous to that of the Particle Delivery PCT or that of the Eye PCT, e.g., by admixing a mixture comprising sgRNA and/or Cas as in the instant invention and components that form a particle, e.g., as in the Particle Delivery PCT or in the Eye PCT, to form a particle and particles from such admixing (or, of course, other particles involving sgRNA and/or Cas as in the instant invention).

### Base Editing

[0713] Cas proteins described herein, e.g., those with reduced immunogenicity, can be used in base editing. In general, the Cas proteins or a variant thereof (such as a dead or inactive Cas) may be associated with a deaminase, e.g., a adenosine or cytidine deaminase. In certain example embodiments, a dCas can be fused with a adenosine deaminase or cytidine deaminase for base editing purposes. Reference is made to PCT/US2018/039616, PCT/US2018/039618, PCT/US2018/052247, PCT/US2018/054469, PCT/US2018/0571179 and PCT/US2018/057177, incorporated herein by reference.

### Adenosine Deaminase

[0714] The term “adenosine deaminase” or “adenosine deaminase protein” as used herein refers to a protein, a polypeptide, or one or more functional domain(s) of a protein or a polypeptide that is capable of catalyzing a hydrolytic deamination reaction that converts an adenine (or an adenine moiety of a molecule) to a hypoxanthine (or a hypoxanthine moiety of a molecule), as shown below. In some embodiments, the adenine-containing molecule is an adenosine (A), and the hypoxanthine-containing molecule is an inosine (I). The adenine-containing molecule can be deoxyribonucleic acid (DNA) or ribonucleic acid (RNA).

[chemical structure]

[0715] According to the present disclosure, adenosine deaminases that can be used in connection with the present disclosure include, but are not limited to, members of the enzyme family known as adenosine deaminases that act on RNA (ADARs), members of the enzyme family known as adenosine deaminases that act on tRNA (ADATs), and other adenosine deaminase domain-containing (ADAD) family members. According to the present disclosure, the adenosine deaminase is capable of targeting adenine in a RNA/DNA and RNA duplexes. Indeed, Zheng et al. (Nucleic Acids Res. 2017, 45(6): 3369-3377) demonstrate that ADARs can carry out adenosine to inosine editing reactions on RNA/DNA and RNA/RNA duplexes. In particular embodiments, the adenosine deaminase has been modified to increase its ability to edit DNA in a RNA/DNA heteroduplex of in an RNA duplex as detailed herein below.

[0716] In some embodiments, the adenosine deaminase is derived from one or more metazoa species, including but not limited to, mammals, birds, frogs, squids, fish, flies and worms. In some embodiments, the adenosine deaminase is a human, squid or Drosophila adenosine deaminase.

[0717] In some embodiments, the adenosine deaminase is a human ADAR, including hADAR1, hADAR2, hADAR3. In some embodiments, the adenosine deaminase is a Caenorhabditis elegans ADAR protein, including ADR-1 and ADR-2. In some embodiments, the adenosine deaminase is a Drosophila ADAR protein, including dAdar. In some embodiments, the adenosine deaminase is a squid Loligo pealeii ADAR protein, including sqADAR2a and sqADAR2b. In some embodiments, the adenosine deaminase is a human ADAT protein. In some embodiments, the adenosine deaminase is a Drosophila ADAT protein. In some embodiments, the adenosine deaminase is a human ADAD protein, including TENR (hADAD1) and TENRL (hADAD2).

[0718] In some embodiments, the adenosine deaminase is a TadA protein such as E. coli TadA. See Kim et al., Biochemistry 45:6407-6416 (2006); Wolf et al., EMBO J. 21:3841-3851 (2002). In some embodiments, the adenosine deaminase is mouse ADA. See Grunebaum et al., Curr. Opin. Allergy Clin. Immunol. 13:630-638 (2013). In some embodiments, the adenosine deaminase is human ADAT2. See Fukui et al., J. Nucleic Acids 2010:260512 (2010). In some embodiments, the deaminase (e.g., adenosine or cytidine deaminase) is one or more of those described in Cox et al., Science. 2017, Nov. 24; 358(6366): 1019-1027; Komore et al., Nature. 2016 May 19; 533(7603):420-4; and Gaudelli et al., Nature. 2017 Nov. 23; 551(7681):464-471.

[0719] In some embodiments, the adenosine deaminase protein recognizes and converts one or more target adenosine residue(s) in a double-stranded nucleic acid substrate into inosine residues (s). In some embodiments, the double-stranded nucleic acid substrate is a RNA-DNA hybrid duplex. In some embodiments, the adenosine deaminase protein recognizes a binding window on the double-stranded substrate. In some embodiments, the binding window contains at least one target adenosine residue(s). In some embodiments, the binding window is in the range of about 3 bp to about 100 bp. In some embodiments, the binding window is in the range of about 5 bp to about 50 bp. In some embodiments, the binding window is in the range of about 10 bp to about 30 bp. In some embodiments, the binding window is about 1 bp, 2 bp, 3 bp, 5 bp, 7 bp, 10 bp, 15 bp, 20 bp, 25 bp, 30 bp, 40 bp, 45 bp, 50 bp, 55 bp, 60 bp, 65 bp, 70 bp, 75 bp, 80 bp, 85 bp, 90 bp, 95 bp, or 100 bp.

[0720] In some embodiments, the adenosine deaminase protein comprises one or more deaminase domains. Not intended to be bound by a particular theory, it is contemplated that the deaminase domain functions to recognize and convert one or more target adenosine (A) residue(s) contained in a double-stranded nucleic acid substrate into inosine (I) residue(s). In some embodiments, the deaminase domain comprises an active center. In some embodiments, the active center comprises a zinc ion. In some embodiments, during the A-to-I editing process, base pairing at the target adenosine residue is disrupted, and the target adenosine residue is “flipped” out of the double helix to become accessible by the adenosine deaminase. In some embodiments, amino acid residues in or near the active center interact with one or more nucleotide(s) 5′ to a target adenosine residue. In some embodiments, amino acid residues in or near the active center interact with one or more nucleotide(s) 3′ to a target adenosine residue. In some embodiments, amino acid residues in or near the active center further interact with the nucleotide complementary to the target adenosine residue on the opposite strand. In some embodiments, the amino acid residues form hydrogen bonds with the 2′ hydroxyl group of the nucleotides.

[0721] In some embodiments, the adenosine deaminase comprises human ADAR2 full protein (hADAR2) or the deaminase domain thereof (hADAR2-D). In some embodiments, the adenosine deaminase is an ADAR family member that is homologous to hADAR2 or hADAR2-D.

[0722] Particularly, in some embodiments, the homologous ADAR protein is human ADAR1 (hADAR1) or the deaminase domain thereof (hADAR1-D). In some embodiments, glycine 1007 of hADAR1-D corresponds to glycine 487 hADAR2-D, and glutamic Acid 1008 of hADAR1-D corresponds to glutamic acid 488 of hADAR2-D.

[0723] In some embodiments, the adenosine deaminase comprises the wild-type amino acid sequence of hADAR2-D. In some embodiments, the adenosine deaminase comprises one or more mutations in the hADAR2-D sequence, such that the editing efficiency, and/or substrate editing preference of hADAR2-D is changed according to specific needs.

[0724] Certain mutations of hADAR1 and hADAR2 proteins have been described in Kuttan et al., Proc Natl Acad Sci USA. (2012) 109(48):E3295-304; Want et al. ACS Chem Biol. (2015) 10(11):2512-9; and Zheng et al. Nucleic Acids Res. (2017) 45(6):3369-337, each of which is incorporated herein by reference in its entirety.

[0725] In some embodiments, the adenosine deaminase comprises a mutation at glycine336 of the hADAR2-D amino acid sequence, or a corresponding position in a homologous ADAR protein. In some embodiments, the glycine residue at position 336 is replaced by an aspartic acid residue (G336D).

[0726] In some embodiments, the adenosine deaminase comprises a mutation at Glycine487 of the hADAR2-D amino acid sequence, or a corresponding position in a homologous ADAR protein. In some embodiments, the glycine residue at position 487 is replaced by a non-polar amino acid residue with relatively small side chains. For example, in some embodiments, the glycine residue at position 487 is replaced by an alanine residue (G487A). In some embodiments, the glycine residue at position 487 is replaced by a valine residue (G487V). In some embodiments, the glycine residue at position 487 is replaced by an amino acid residue with relatively large side chains. In some embodiments, the glycine residue at position 487 is replaced by a arginine residue (G487R). In some embodiments, the glycine residue at position 487 is replaced by a lysine residue (G487K). In some embodiments, the glycine residue at position 487 is replaced by a tryptophan residue (G487 W). In some embodiments, the glycine residue at position 487 is replaced by a tyrosine residue (G487Y).

[0727] In some embodiments, the adenosine deaminase comprises a mutation at glutamic acid488 of the hADAR2-D amino acid sequence, or a corresponding position in a homologous ADAR protein. In some embodiments, the glutamic acid residue at position 488 is replaced by a glutamine residue (E488Q). In some embodiments, the glutamic acid residue at position 488 is replaced by a histidine residue (E488H). In some embodiments, the glutamic acid residue at position 488 is replace by an arginine residue (E488R). In some embodiments, the glutamic acid residue at position 488 is replace by a lysine residue (E488K). In some embodiments, the glutamic acid residue at position 488 is replace by an asparagine residue (E488N). In some embodiments, the glutamic acid residue at position 488 is replace by an alanine residue (E488A). In some embodiments, the glutamic acid residue at position 488 is replace by a Methionine residue (E488M). In some embodiments, the glutamic acid residue at position 488 is replace by a serine residue (E488S). In some embodiments, the glutamic acid residue at position 488 is replace by a phenylalanine residue (E488F). In some embodiments, the glutamic acid residue at position 488 is replace by a lysine residue (E488L). In some embodiments, the glutamic acid residue at position 488 is replace by a tryptophan residue (E488 W).

[0728] In some embodiments, the adenosine deaminase comprises a mutation at threonine 490 of the hADAR2-D amino acid sequence, or a corresponding position in a homologous ADAR protein. In some embodiments, the threonine residue at position 490 is replaced by a cysteine residue (T490C). In some embodiments, the threonine residue at position 490 is replaced by a serine residue (T490S). In some embodiments, the threonine residue at position 490 is replaced by an alanine residue (T490A). In some embodiments, the threonine residue at position 490 is replaced by a phenylalanine residue (T490F). In some embodiments, the threonine residue at position 490 is replaced by a tyrosine residue (T490Y). In some embodiments, the threonine residue at position 490 is replaced by a serine residue (T490R). In some embodiments, the threonine residue at position 490 is replaced by an alanine residue (T490K). In some embodiments, the threonine residue at position 490 is replaced by a phenylalanine residue (T490P). In some embodiments, the threonine residue at position 490 is replaced by a tyrosine residue (T490E).

[0729] In some embodiments, the adenosine deaminase comprises a mutation at valine 493 of the hADAR2-D amino acid sequence, or a corresponding position in a homologous ADAR protein. In some embodiments, the valine residue at position 493 is replaced by an alanine residue (V493A). In some embodiments, the valine residue at position 493 is replaced by a serine residue (V493S). In some embodiments, the valine residue at position 493 is replaced by a threonine residue (V493T). In some embodiments, the valine residue at position 493 is replaced by an arginine residue (V493R). In some embodiments, the valine residue at position 493 is replaced by an aspartic acid residue (V493D). In some embodiments, the valine residue at position 493 is replaced by a proline residue (V493P). In some embodiments, the valine residue at position 493 is replaced by a glycine residue (V493G).

[0730] In some embodiments, the adenosine deaminase comprises a mutation at alanine 589 of the hADAR2-D amino acid sequence, or a corresponding position in a homologous ADAR protein. In some embodiments, the alanine residue at position 589 is replaced by a valine residue (A589V).

[0731] In some embodiments, the adenosine deaminase comprises a mutation at asparagine 597 of the hADAR2-D amino acid sequence, or a corresponding position in a homologous ADAR protein. In some embodiments, the asparagine residue at position 597 is replaced by a lysine residue (N597K). In some embodiments, the adenosine deaminase comprises a mutation at position 597 of the amino acid sequence, which has an asparagine residue in the wild type sequence. In some embodiments, the asparagine residue at position 597 is replaced by an arginine residue (N597R). In some embodiments, the adenosine deaminase comprises a mutation at position 597 of the amino acid sequence, which has an asparagine residue in the wild type sequence. In some embodiments, the asparagine residue at position 597 is replaced by an alanine residue (N597A). In some embodiments, the adenosine deaminase comprises a mutation at position 597 of the amino acid sequence, which has an asparagine residue in the wild type sequence. In some embodiments, the asparagine residue at position 597 is replaced by a glutamic acid residue (N597E). In some embodiments, the adenosine deaminase comprises a mutation at position 597 of the amino acid sequence, which has an asparagine residue in the wild type sequence. In some embodiments, the asparagine residue at position 597 is replaced by a histidine residue (N597H). In some embodiments, the adenosine deaminase comprises a mutation at position 597 of the amino acid sequence, which has an asparagine residue in the wild type sequence. In some embodiments, the asparagine residue at position 597 is replaced by a glycine residue (N597G). In some embodiments, the adenosine deaminase comprises a mutation at position 597 of the amino acid sequence, which has an asparagine residue in the wild type sequence. In some embodiments, the asparagine residue at position 597 is replaced by a tyrosine residue (N597Y). In some embodiments, the asparagine residue at position 597 is replaced by a phenylalanine residue (N597F). In some embodiments, the adenosine deaminase comprises mutation N597I. In some embodiments, the adenosine deaminase comprises mutation N597L. In some embodiments, the adenosine deaminase comprises mutation N597V. In some embodiments, the adenosine deaminase comprises mutation N597M. In some embodiments, the adenosine deaminase comprises mutation N597C. In some embodiments, the adenosine deaminase comprises mutation N597P. In some embodiments, the adenosine deaminase comprises mutation N597T. In some embodiments, the adenosine deaminase comprises mutation N597S. In some embodiments, the adenosine deaminase comprises mutation N597 W. In some embodiments, the adenosine deaminase comprises mutation N597Q. In some embodiments, the adenosine deaminase comprises mutation N597D. In certain example embodiments, the mutations at N597 described above are further made in the context of an E488Q background

[0732] In some embodiments, the adenosine deaminase comprises a mutation at serine599 of the hADAR2-D amino acid sequence, or a corresponding position in a homologous ADAR protein. In some embodiments, the serine residue at position 599 is replaced by a threonine residue (S599T).

[0733] In some embodiments, the adenosine deaminase comprises a mutation at asparagine 613 of the hADAR2-D amino acid sequence, or a corresponding position in a homologous ADAR protein. In some embodiments, the asparagine residue at position 613 is replaced by a lysine residue (N613K). In some embodiments, the adenosine deaminase comprises a mutation at position 613 of the amino acid sequence, which has an asparagine residue in the wild type sequence. In some embodiments, the asparagine residue at position 613 is replaced by an arginine residue (N613R). In some embodiments, the adenosine deaminase comprises a mutation at position 613 of the amino acid sequence, which has an asparagine residue in the wild type sequence. In some embodiments, the asparagine residue at position 613 is replaced by an alanine residue (N613A) In some embodiments, the adenosine deaminase comprises a mutation at position 613 of the amino acid sequence, which has an asparagine residue in the wild type sequence. In some embodiments, the asparagine residue at position 613 is replaced by a glutamic acid residue (N613E). In some embodiments, the adenosine deaminase comprises mutation N613I. In some embodiments, the adenosine deaminase comprises mutation N613L. In some embodiments, the adenosine deaminase comprises mutation N613V. In some embodiments, the adenosine deaminase comprises mutation N613F. In some embodiments, the adenosine deaminase comprises mutation N613M. In some embodiments, the adenosine deaminase comprises mutation N613C. In some embodiments, the adenosine deaminase comprises mutation N613G. In some embodiments, the adenosine deaminase comprises mutation N613P. In some embodiments, the adenosine deaminase comprises mutation N613T. In some embodiments, the adenosine deaminase comprises mutation N613S. In some embodiments, the adenosine deaminase comprises mutation N613Y. In some embodiments, the adenosine deaminase comprises mutation N613 W. In some embodiments, the adenosine deaminase comprises mutation N613Q. In some embodiments, the adenosine deaminase comprises mutation N613H. In some embodiments, the adenosine deaminase comprises mutation N613D. In some embodiments, the mutations at N613 described above are further made in combination with a E488Q mutation.

[0734] In some embodiments, to improve editing efficiency, the adenosine deaminase may comprise one or more of the mutations: G336D, G487A, G487V, E488Q, E488H, E488R, E488N, E488A, E488S, E488M, T490C, T490S, V493T, V493S, V493A, V493R, V493D, V493P, V493G, N597K, N597R, N597A, N597E, N597H, N597G, N597Y, A589V, S599T, N613K, N613R, N613A, N613E, based on amino acid sequence positions of hADAR2-D, and mutations in a homologous ADAR protein corresponding to the above.

[0735] In some embodiments, to reduce editing efficiency, the adenosine deaminase may comprise one or more of the mutations: E488F, E488L, E488 W, T490A, T490F, T490Y, T490R, T490K, T490P, T490E, N597F, based on amino acid sequence positions of hADAR2-D, and mutations in a homologous ADAR protein corresponding to the above. In particular embodiments, it can be of interest to use an adenosine deaminase enzyme with reduced efficacy to reduce off-target effects.

[0736] In some embodiments, to reduce off-target effects, the adenosine deaminase comprises one or more of mutations at R348, V351, T375, K376, E396, C451, R455, N473, R474, K475, R477, R481, S486, E488, T490, S495, R510, based on amino acid sequence positions of hADAR2-D, and mutations in a homologous ADAR protein corresponding to the above. In some embodiments, the adenosine deaminase comprises mutation at E488 and one or more additional positions selected from R348, V351, T375, K376, E396, C451, R455, N473, R474, K475, R477, R481, S486, T490, S495, R510. In some embodiments, the adenosine deaminase comprises mutation at T375, and optionally at one or more additional positions. In some embodiments, the adenosine deaminase comprises mutation at N473, and optionally at one or more additional positions. In some embodiments, the adenosine deaminase comprises mutation at V351, and optionally at one or more additional positions. In some embodiments, the adenosine deaminase comprises mutation at E488 and T375, and optionally at one or more additional positions. In some embodiments, the adenosine deaminase comprises mutation at E488 and N473, and optionally at one or more additional positions. In some embodiments, the adenosine deaminase comprises mutation E488 and V351, and optionally at one or more additional positions. In some embodiments, the adenosine deaminase comprises mutation at E488 and one or more of T375, N473, and V351.

[0737] In some embodiments, to reduce off-target effects, the adenosine deaminase comprises one or more of mutations selected from R348E, V351L, T375G, T375S, R455G, R455S, R455E, N473D, R474E, K475Q, R477E, R481E, S486T, E488Q, T490A, T490S, S495T, and R510E, based on amino acid sequence positions of hADAR2-D, and mutations in a homologous ADAR protein corresponding to the above. In some embodiments, the adenosine deaminase comprises mutation E488Q and one or more additional mutations selected from R348E, V351L, T375G, T375S, R455G, R455S, R455E, N473D, R474E, K475Q, R477E, R481E, S486T, T490A, T490S, S495T, and R510E. In some embodiments, the adenosine deaminase comprises mutation T375G or T375S, and optionally one or more additional mutations. In some embodiments, the adenosine deaminase comprises mutation N473D, and optionally one or more additional mutations. In some embodiments, the adenosine deaminase comprises mutation V351L, and optionally one or more additional mutations. In some embodiments, the adenosine deaminase comprises mutation E488Q, and T375G or T375G, and optionally one or more additional mutations. In some embodiments, the adenosine deaminase comprises mutation E488Q and N473D, and optionally one or more additional mutations. In some embodiments, the adenosine deaminase comprises mutation E488Q and V351L, and optionally one or more additional mutations. In some embodiments, the adenosine deaminase comprises mutation E488Q and one or more of T375G/S, N473D and V351L.

[0738] In certain examples, the adenosine deaminase protein or catalytic domain thereof has been modified to comprise a mutation at E488, preferably E488Q, of the hADAR2-D amino acid sequence, or a corresponding position in a homologous ADAR protein and/or wherein the adenosine deaminase protein or catalytic domain thereof has been modified to comprise a mutation at T375, preferably T375G of the hADAR2-D amino acid sequence, or a corresponding position in a homologous ADAR protein. In certain examples, the adenosine deaminase protein or catalytic domain thereof has been modified to comprise a mutation at E1008, preferably E1008Q, of the hADAR1d amino acid sequence, or a corresponding position in a homologous ADAR protein.

[0739] Crystal structures of the human ADAR2 deaminase domain bound to duplex RNA reveal a protein loop that binds the RNA on the 5′ side of the modification site. This 5′ binding loop is one contributor to substrate specificity differences between ADAR family members. See Wang et al., Nucleic Acids Res., 44(20):9872-9880 (2016), the content of which is incorporated herein by reference in its entirety. In addition, an ADAR2-specific RNA-binding loop was identified near the enzyme active site. See Mathews et al., Nat. Struct. Mol. Biol., 23(5):426-33 (2016), the content of which is incorporated herein by reference in its entirety. In some embodiments, the adenosine deaminase comprises one or more mutations in the RNA binding loop to improve editing specificity and/or efficiency.

[0740] In some embodiments, the adenosine deaminase comprises a mutation at alanine454 of the hADAR2-D amino acid sequence, or a corresponding position in a homologous ADAR protein. In some embodiments, the alanine residue at position 454 is replaced by a serine residue (A454S). In some embodiments, the alanine residue at position 454 is replaced by a cysteine residue (A454C). In some embodiments, the alanine residue at position 454 is replaced by an aspartic acid residue (A454D).

[0741] In some embodiments, the adenosine deaminase comprises a mutation at arginine 455 of the hADAR2-D amino acid sequence, or a corresponding position in a homologous ADAR protein. In some embodiments, the arginine residue at position 455 is replaced by an alanine residue (R455A). In some embodiments, the arginine residue at position 455 is replaced by a valine residue (R455V). In some embodiments, the arginine residue at position 455 is replaced by a histidine residue (R455H). In some embodiments, the arginine residue at position 455 is replaced by a glycine residue (R455G). In some embodiments, the arginine residue at position 455 is replaced by a serine residue (R455S). In some embodiments, the arginine residue at position 455 is replaced by a glutamic acid residue (R455E). In some embodiments, the adenosine deaminase comprises mutation R455C. In some embodiments, the adenosine deaminase comprises mutation R455I. In some embodiments, the adenosine deaminase comprises mutation R455K. In some embodiments, the adenosine deaminase comprises mutation R455L. In some embodiments, the adenosine deaminase comprises mutation R455M. In some embodiments, the adenosine deaminase comprises mutation R455N. In some embodiments, the adenosine deaminase comprises mutation R455Q. In some embodiments, the adenosine deaminase comprises mutation R455F. In some embodiments, the adenosine deaminase comprises mutation R455 W. In some embodiments, the adenosine deaminase comprises mutation R455P. In some embodiments, the adenosine deaminase comprises mutation R455Y. In some embodiments, the adenosine deaminase comprises mutation R455E. In some embodiments, the adenosine deaminase comprises mutation R455D. In some embodiments, the mutations at R455 described above are further made in combination with a E488Q mutation.

[0742] In some embodiments, the adenosine deaminase comprises a mutation at isoleucine 456 of the hADAR2-D amino acid sequence, or a corresponding position in a homologous ADAR protein. In some embodiments, the isoleucine residue at position 456 is replaced by a valine residue (I456V). In some embodiments, the isoleucine residue at position 456 is replaced by a leucine residue (I456L). In some embodiments, the isoleucine residue at position 456 is replaced by an aspartic acid residue (I456D).

[0743] In some embodiments, the adenosine deaminase comprises a mutation at phenylalanine 457 of the hADAR2-D amino acid sequence, or a corresponding position in a homologous ADAR protein. In some embodiments, the phenylalanine residue at position 457 is replaced by a tyrosine residue (F457Y). In some embodiments, the phenylalanine residue at position 457 is replaced by an arginine residue (F457R). In some embodiments, the phenylalanine residue at position 457 is replaced by a glutamic acid residue (F457E).

[0744] In some embodiments, the adenosine deaminase comprises a mutation at serine 458 of the hADAR2-D amino acid sequence, or a corresponding position in a homologous ADAR protein. In some embodiments, the serine residue at position 458 is replaced by a valine residue (S458V). In some embodiments, the serine residue at position 458 is replaced by a phenylalanine residue (S458F). In some embodiments, the serine residue at position 458 is replaced by a proline residue (S458P). In some embodiments, the adenosine deaminase comprises mutation S458I. In some embodiments, the adenosine deaminase comprises mutation S458L. In some embodiments, the adenosine deaminase comprises mutation S458M. In some embodiments, the adenosine deaminase comprises mutation S458C. In some embodiments, the adenosine deaminase comprises mutation S458A. In some embodiments, the adenosine deaminase comprises mutation S458G. In some embodiments, the adenosine deaminase comprises mutation S458T. In some embodiments, the adenosine deaminase comprises mutation S458Y. In some embodiments, the adenosine deaminase comprises mutation S458 W. In some embodiments, the adenosine deaminase comprises mutation S458Q. In some embodiments, the adenosine deaminase comprises mutation S458N. In some embodiments, the adenosine deaminase comprises mutation S458H. In some embodiments, the adenosine deaminase comprises mutation S458E. In some embodiments, the adenosine deaminase comprises mutation S458D. In some embodiments, the adenosine deaminase comprises mutation S458K. In some embodiments, the adenosine deaminase comprises mutation S458R. In some embodiments, the mutations at S458 described above are further made in combination with a E488Q mutation.

[0745] In some embodiments, the adenosine deaminase comprises a mutation at proline 459 of the hADAR2-D amino acid sequence, or a corresponding position in a homologous ADAR protein. In some embodiments, the proline residue at position 459 is replaced by a cysteine residue (P459C). In some embodiments, the proline residue at position 459 is replaced by a histidine residue (P459H). In some embodiments, the proline residue at position 459 is replaced by a tryptophan residue (P459 W).

[0746] In some embodiments, the adenosine deaminase comprises a mutation at histidine 460 of the hADAR2-D amino acid sequence, or a corresponding position in a homologous ADAR protein. In some embodiments, the histidine residue at position 460 is replaced by an arginine residue (H460R). In some embodiments, the histidine residue at position 460 is replaced by an isoleucine residue (H460I). In some embodiments, the histidine residue at position 460 is replaced by a proline residue (H460P). In some embodiments, the adenosine deaminase comprises mutation H460L. In some embodiments, the adenosine deaminase comprises mutation H460V. In some embodiments, the adenosine deaminase comprises mutation H460F. In some embodiments, the adenosine deaminase comprises mutation H460M. In some embodiments, the adenosine deaminase comprises mutation H460C. In some embodiments, the adenosine deaminase comprises mutation H460A. In some embodiments, the adenosine deaminase comprises mutation H460G. In some embodiments, the adenosine deaminase comprises mutation H460T. In some embodiments, the adenosine deaminase comprises mutation H460S. In some embodiments, the adenosine deaminase comprises mutation H460Y. In some embodiments, the adenosine deaminase comprises mutation H460 W. In some embodiments, the adenosine deaminase comprises mutation H460Q. In some embodiments, the adenosine deaminase comprises mutation H460N. In some embodiments, the adenosine deaminase comprises mutation H460E. In some embodiments, the adenosine deaminase comprises mutation H460D. In some embodiments, the adenosine deaminase comprises mutation H460K. In some embodiments, the mutations at H460 described above are further made in combination with a E488Q mutation.

[0747] In some embodiments, the adenosine deaminase comprises a mutation at proline 462 of the hADAR2-D amino acid sequence, or a corresponding position in a homologous ADAR protein. In some embodiments, the proline residue at position 462 is replaced by a serine residue (P462S). In some embodiments, the proline residue at position 462 is replaced by a tryptophan residue (P462 W). In some embodiments, the proline residue at position 462 is replaced by a glutamic acid residue (P462E).

[0748] In some embodiments, the adenosine deaminase comprises a mutation at aspartic acid469 of the hADAR2-D amino acid sequence, or a corresponding position in a homologous ADAR protein. In some embodiments, the aspartic acid residue at position 469 is replaced by a glutamine residue (D469Q). In some embodiments, the aspartic acid residue at position 469 is replaced by a serine residue (D469S). In some embodiments, the aspartic acid residue at position 469 is replaced by a tyrosine residue (D469Y).

[0749] In some embodiments, the adenosine deaminase comprises a mutation at arginine 470 of the hADAR2-D amino acid sequence, or a corresponding position in a homologous ADAR protein. In some embodiments, the arginine residue at position 470 is replaced by an alanine residue (R470A). In some embodiments, the arginine residue at position 470 is replaced by an isoleucine residue (R470I). In some embodiments, the arginine residue at position 470 is replaced by an aspartic acid residue (R470D).

[0750] In some embodiments, the adenosine deaminase comprises a mutation at histidine 471 of the hADAR2-D amino acid sequence, or a corresponding position in a homologous ADAR protein. In some embodiments, the histidine residue at position 471 is replaced by a lysine residue (H471K). In some embodiments, the histidine residue at position 471 is replaced by a threonine residue (H471T). In some embodiments, the histidine residue at position 471 is replaced by a valine residue (H471V).

[0751] In some embodiments, the adenosine deaminase comprises a mutation at proline 472 of the hADAR2-D amino acid sequence, or a corresponding position in a homologous ADAR protein. In some embodiments, the proline residue at position 472 is replaced by a lysine residue (P472K). In some embodiments, the proline residue at position 472 is replaced by a threonine residue (P472T). In some embodiments, the proline residue at position 472 is replaced by an aspartic acid residue (P472D).

[0752] In some embodiments, the adenosine deaminase comprises a mutation at asparagine 473 of the hADAR2-D amino acid sequence, or a corresponding position in a homologous ADAR protein. In some embodiments, the asparagine residue at position 473 is replaced by an arginine residue (N473R). In some embodiments, the asparagine residue at position 473 is replaced by a tryptophan residue (N473 W). In some embodiments, the asparagine residue at position 473 is replaced by a proline residue (N473P). In some embodiments, the asparagine residue at position 473 is replaced by an aspartic acid residue (N473D).

[0753] In some embodiments, the adenosine deaminase comprises a mutation at arginine 474 of the hADAR2-D amino acid sequence, or a corresponding position in a homologous ADAR protein. In some embodiments, the arginine residue at position 474 is replaced by a lysine residue (R474K). In some embodiments, the arginine residue at position 474 is replaced by a glycine residue (R474G). In some embodiments, the arginine residue at position 474 is replaced by an aspartic acid residue (R474D). In some embodiments, the arginine residue at position 474 is replaced by a glutamic acid residue (R474E).

[0754] In some embodiments, the adenosine deaminase comprises a mutation at lysine 475 of the hADAR2-D amino acid sequence, or a corresponding position in a homologous ADAR protein. In some embodiments, the lysine residue at position 475 is replaced by a glutamine residue (K475Q). In some embodiments, the lysine residue at position 475 is replaced by an asparagine residue (K475N). In some embodiments, the lysine residue at position 475 is replaced by an aspartic acid residue (K475D).

[0755] In some embodiments, the adenosine deaminase comprises a mutation at alanine 476 of the hADAR2-D amino acid sequence, or a corresponding position in a homologous ADAR protein. In some embodiments, the alanine residue at position 476 is replaced by a serine residue (A476S). In some embodiments, the alanine residue at position 476 is replaced by an arginine residue (A476R). In some embodiments, the alanine residue at position 476 is replaced by a glutamic acid residue (A476E).

[0756] In some embodiments, the adenosine deaminase comprises a mutation at arginine 477 of the hADAR2-D amino acid sequence, or a corresponding position in a homologous ADAR protein. In some embodiments, the arginine residue at position 477 is replaced by a lysine residue (R477K). In some embodiments, the arginine residue at position 477 is replaced by a threonine residue (R477T). In some embodiments, the arginine residue at position 477 is replaced by a phenylalanine residue (R477F). In some embodiments, the arginine residue at position 474 is replaced by a glutamic acid residue (R477E).

[0757] In some embodiments, the adenosine deaminase comprises a mutation at glycine 478 of the hADAR2-D amino acid sequence, or a corresponding position in a homologous ADAR protein. In some embodiments, the glycine residue at position 478 is replaced by an alanine residue (G478A). In some embodiments, the glycine residue at position 478 is replaced by an arginine residue (G478R). In some embodiments, the glycine residue at position 478 is replaced by a tyrosine residue (G478Y). In some embodiments, the adenosine deaminase comprises mutation G478I. In some embodiments, the adenosine deaminase comprises mutation G478L. In some embodiments, the adenosine deaminase comprises mutation G478V. In some embodiments, the adenosine deaminase comprises mutation G478F. In some embodiments, the adenosine deaminase comprises mutation G478M. In some embodiments, the adenosine deaminase comprises mutation G478C. In some embodiments, the adenosine deaminase comprises mutation G478P. In some embodiments, the adenosine deaminase comprises mutation G478T. In some embodiments, the adenosine deaminase comprises mutation G478S. In some embodiments, the adenosine deaminase comprises mutation G478 W. In some embodiments, the adenosine deaminase comprises mutation G478Q. In some embodiments, the adenosine deaminase comprises mutation G478N. In some embodiments, the adenosine deaminase comprises mutation G478H. In some embodiments, the adenosine deaminase comprises mutation G478E. In some embodiments, the adenosine deaminase comprises mutation G478D. In some embodiments, the adenosine deaminase comprises mutation G478K. In some embodiments, the mutations at G478 described above are further made in combination with a E488Q mutation.

[0758] In some embodiments, the adenosine deaminase comprises a mutation at glutamine 479 of the hADAR2-D amino acid sequence, or a corresponding position in a homologous ADAR protein. In some embodiments, the glutamine residue at position 479 is replaced by an asparagine residue (Q479N). In some embodiments, the glutamine residue at position 479 is replaced by a serine residue (Q479S). In some embodiments, the glutamine residue at position 479 is replaced by a proline residue (Q479P).

[0759] In some embodiments, the adenosine deaminase comprises a mutation at arginine 348 of the hADAR2-D amino acid sequence, or a corresponding position in a homologous ADAR protein. In some embodiments, the arginine residue at position 348 is replaced by an alanine residue (R348A). In some embodiments, the arginine residue at position 348 is replaced by a glutamic acid residue (R348E).

[0760] In some embodiments, the adenosine deaminase comprises a mutation at valine 351 of the hADAR2-D amino acid sequence, or a corresponding position in a homologous ADAR protein. In some embodiments, the valine residue at position 351 is replaced by a leucine residue (V351L). In some embodiments, the adenosine deaminase comprises mutation V351Y. In some embodiments, the adenosine deaminase comprises mutation V351M. In some embodiments, the adenosine deaminase comprises mutation V351T. In some embodiments, the adenosine deaminase comprises mutation V351G. In some embodiments, the adenosine deaminase comprises mutation V351A. In some embodiments, the adenosine deaminase comprises mutation V351F. In some embodiments, the adenosine deaminase comprises mutation V351E. In some embodiments, the adenosine deaminase comprises mutation V351I. In some embodiments, the adenosine deaminase comprises mutation V351C. In some embodiments, the adenosine deaminase comprises mutation V351H. In some embodiments, the adenosine deaminase comprises mutation V351P. In some embodiments, the adenosine deaminase comprises mutation V351S. In some embodiments, the adenosine deaminase comprises mutation V351K. In some embodiments, the adenosine deaminase comprises mutation V351N. In some embodiments, the adenosine deaminase comprises mutation V351 W. In some embodiments, the adenosine deaminase comprises mutation V351Q. In some embodiments, the adenosine deaminase comprises mutation V351D. In some embodiments, the adenosine deaminase comprises mutation V351R. In some embodiments, the mutations at V351 described above are further made in combination with a E488Q mutation.

[0761] In some embodiments, the adenosine deaminase comprises a mutation at threonine 375 of the hADAR2-D amino acid sequence, or a corresponding position in a homologous ADAR protein. In some embodiments, the threonine residue at position 375 is replaced by a glycine residue (T375G). In some embodiments, the threonine residue at position 375 is replaced by a serine residue (T375S). In some embodiments, the adenosine deaminase comprises mutation T375H. In some embodiments, the adenosine deaminase comprises mutation T375Q. In some embodiments, the adenosine deaminase comprises mutation T375C. In some embodiments, the adenosine deaminase comprises mutation T375N. In some embodiments, the adenosine deaminase comprises mutation T375M. In some embodiments, the adenosine deaminase comprises mutation T375A. In some embodiments, the adenosine deaminase comprises mutation T375 W. In some embodiments, the adenosine deaminase comprises mutation T375V. In some embodiments, the adenosine deaminase comprises mutation T375R. In some embodiments, the adenosine deaminase comprises mutation T375E. In some embodiments, the adenosine deaminase comprises mutation T375K. In some embodiments, the adenosine deaminase comprises mutation T375F. In some embodiments, the adenosine deaminase comprises mutation T375I. In some embodiments, the adenosine deaminase comprises mutation T375D. In some embodiments, the adenosine deaminase comprises mutation T375P. In some embodiments, the adenosine deaminase comprises mutation T375L. In some embodiments, the adenosine deaminase comprises mutation T375Y. In some embodiments, the mutations at T375Y described above are further made in combination with an E488Q mutation.

[0762] In some embodiments, the adenosine deaminase comprises a mutation at Arg481 of the hADAR2-D amino acid sequence, or a corresponding position in a homologous ADAR protein. In some embodiments, the arginine residue at position 481 is replaced by a glutamic acid residue (R481E).

[0763] In some embodiments, the adenosine deaminase comprises a mutation at Ser486 of the hADAR2-D amino acid sequence, or a corresponding position in a homologous ADAR protein. In some embodiments, the serine residue at position 486 is replaced by a threonine residue (S486T).

[0764] In some embodiments, the adenosine deaminase comprises a mutation at Thr490 of the hADAR2-D amino acid sequence, or a corresponding position in a homologous ADAR protein. In some embodiments, the threonine residue at position 490 is replaced by an alanine residue (T490A). In some embodiments, the threonine residue at position 490 is replaced by a serine residue (T490S).

[0765] In some embodiments, the adenosine deaminase comprises a mutation at Ser495 of the hADAR2-D amino acid sequence, or a corresponding position in a homologous ADAR protein. In some embodiments, the serine residue at position 495 is replaced by a threonine residue (S495T).

[0766] In some embodiments, the adenosine deaminase comprises a mutation at Arg510 of the hADAR2-D amino acid sequence, or a corresponding position in a homologous ADAR protein. In some embodiments, the arginine residue at position 510 is replaced by a glutamine residue (R510Q). In some embodiments, the arginine residue at position 510 is replaced by an alanine residue (R510A). In some embodiments, the arginine residue at position 510 is replaced by a glutamic acid residue (R510E).

[0767] In some embodiments, the adenosine deaminase comprises a mutation at Gly593 of the hADAR2-D amino acid sequence, or a corresponding position in a homologous ADAR protein. In some embodiments, the glycine residue at position 593 is replaced by an alanine residue (G593A). In some embodiments, the glycine residue at position 593 is replaced by a glutamic acid residue (G593E).

[0768] In some embodiments, the adenosine deaminase comprises a mutation at Lys594 of the hADAR2-D amino acid sequence, or a corresponding position in a homologous ADAR protein. In some embodiments, the lysine residue at position 594 is replaced by an alanine residue (K594A).

[0769] In some embodiments, the adenosine deaminase comprises a mutation at any one or more of positions A454, R455, 1456, F457, S458, P459, H460, P462, D469, R470, H471, P472, N473, R474, K475, A476, R477, G478, Q479, R348, R510, G593, K594 of the hADAR2-D amino acid sequence, or a corresponding position in a homologous ADAR protein.

[0770] In some embodiments, the adenosine deaminase comprises any one or more of mutations A454S, A454C, A454D, R455A, R455V, R455H, 1456V, 1456L, 1456D, F457Y, F457R, F457E, S458V, S458F, S458P, P459C, P459H, P459 W, H460R, H460I, H460P, P462S, P462 W, P462E, D469Q, D469S, D469Y, R470A, R470I, R470D, H471K, H471T, H471V, P472K, P472T, P472D, N473R, N473 W, N473P, R474K, R474G, R474D, K475Q, K475N, K475D, A476S, A476R, A476E, R477K, R477T, R477F, G478A, G478R, G478Y, Q479N, Q479S, Q479P, R348A, R510Q, R510A, G593A, G593E, K594A of the hADAR2-D amino acid sequence, or a corresponding position in a homologous ADAR protein.

[0771] In certain embodiments the adenosine deaminase is mutated to convert the activity to cytidine deaminase. Accordingly in some embodiments, the adenosine deaminase comprises one or more mutations in positions selected from E396, C451, V351, R455, T375, K376, S486, Q488, R510, K594, R348, G593, S397, H443, L444, Y445, F442, E438, T448, A353, V355, T339, P539, T339, P539, V525 I520, P462 and N579. In particular embodiments, the adenosine deaminase comprises one or more mutations in a position selected from V351, L444, V355, V525 and 1520. In some embodiments, the adenosine deaminase may comprise one or more of mutations at E488, V351, S486, T375, S370, P462, N597, based on amino acid sequence positions of hADAR2-D, and mutations in a homologous ADAR protein corresponding to the above.

[0772] In some embodiments, the adenosine deaminase may comprise one or more of the mutations: E488Q based on amino acid sequence positions of hADAR2-D, and mutations in a homologous ADAR protein corresponding to the above. In some embodiments, the adenosine deaminase may comprise one or more of the mutations: E488Q, V351G, based on amino acid sequence positions of hADAR2-D, and mutations in a homologous ADAR protein corresponding to the above. In some embodiments, the adenosine deaminase may comprise one or more of the mutations: E488Q, V351G, S486A, based on amino acid sequence positions of hADAR2-D, and mutations in a homologous ADAR protein corresponding to the above. In some embodiments, the adenosine deaminase may comprise one or more of the mutations: E488Q, V351G, S486A, T375S, based on amino acid sequence positions of hADAR2-D, and mutations in a homologous ADAR protein corresponding to the above. In some embodiments, the adenosine deaminase may comprise one or more of the mutations: E488Q, V351G, S486A, T375S, S370C, based on amino acid sequence positions of hADAR2-D, and mutations in a homologous ADAR protein corresponding to the above. In some embodiments, the adenosine deaminase may comprise one or more of the mutations: E488Q, V351G, S486A, T375S, S370C, P462A, based on amino acid sequence positions of hADAR2-D, and mutations in a homologous ADAR protein corresponding to the above. In some embodiments, the adenosine deaminase may comprise one or more of the mutations: E488Q, V351G, S486A, T375S, S370C, P462A, N597I, based on amino acid sequence positions of hADAR2-D, and mutations in a homologous ADAR protein corresponding to the above. In some embodiments, the adenosine deaminase may comprise one or more of the mutations: E488Q, V351G, S486A, T375S, S370C, P462A, N597I, L332I, based on amino acid sequence positions of hADAR2-D, and mutations in a homologous ADAR protein corresponding to the above. In some embodiments, the adenosine deaminase may comprise one or more of the mutations: E488Q, V351G, S486A, T375S, S370C, P462A, N597I, L332I, I398V, based on amino acid sequence positions of hADAR2-D, and mutations in a homologous ADAR protein corresponding to the above. In some embodiments, the adenosine deaminase may comprise one or more of the mutations: E488Q, V351G, S486A, T375S, S370C, P462A, N597I, L332I, I398V, K350I, based on amino acid sequence positions of hADAR2-D, and mutations in a homologous ADAR protein corresponding to the above. In some embodiments, the adenosine deaminase may comprise one or more of the mutations: E488Q, V351G, S486A, T375S, S370C, P462A, N597I, L332I, I398V, K350I, M383L, based on amino acid sequence positions of hADAR2-D, and mutations in a homologous ADAR protein corresponding to the above. In some embodiments, the adenosine deaminase may comprise one or more of the mutations: E488Q, V351G, S486A, T375S, S370C, P462A, N597I, L332I, I398V, K350I, M383L, D619G, based on amino acid sequence positions of hADAR2-D, and mutations in a homologous ADAR protein corresponding to the above. In some embodiments, the adenosine deaminase may comprise one or more of the mutations: E488Q, V351G, S486A, T375S, S370C, P462A, N597I, L332I, I398V, K350I, M383L, D619G, S582T, based on amino acid sequence positions of hADAR2-D, and mutations in a homologous ADAR protein corresponding to the above. In some embodiments, the adenosine deaminase may comprise one or more of the mutations: E488Q, V351G, S486A, T375S, S370C, P462A, N597I, L332I, I398V, K350I, M383L, D619G, S582T, V440I based on amino acid sequence positions of hADAR2-D, and mutations in a homologous ADAR protein corresponding to the above. In some embodiments, the adenosine deaminase may comprise one or more of the mutations: E488Q, V351G, S486A, T375S, S370C, P462A, N597I, L332I, I398V, K350I, M383L, D619G, S582T, V440I, S495N based on amino acid sequence positions of hADAR2-D, and mutations in a homologous ADAR protein corresponding to the above. In some embodiments, the adenosine deaminase may comprise one or more of the mutations: E488Q, V351G, S486A, T375S, S370C, P462A, N597I, L332I, I398V, K350I, M383L, D619G, S582T, V440I, S495N, K418E based on amino acid sequence positions of hADAR2-D, and mutations in a homologous ADAR protein corresponding to the above. In some embodiments, the adenosine deaminase may comprise one or more of the mutations: E488Q, V351G, S486A, T375S, S370C, P462A, N597I, L332I, I398V, K350I, M383L, D619G, S582T, V440I, S495N, K418E, S661T based on amino acid sequence positions of hADAR2-D, and mutations in a homologous ADAR protein corresponding to the above. In some examples, provided herein includes a mutated adenosine deaminase e.g., an adenosine deaminase comprising one or more mutations of E488Q, V351G, S486A, T375S, S370C, P462A, N597I, L332I, I398V, K350I, M383L, D619G, S582T, V440I, S495N, K418E, S661T, fused with a dead CRISPR-Cas protein or CRISPR-Cas nickase. In a particular example, provided herein includes a mutated adenosine deaminase e.g., an adenosine deaminase comprising E488Q, V351G, S486A, T375S, S370C, P462A, N597I, L332I, 1398V, K350I, M383L, D619G, S582T, V440I, S495N, K418E, and S661T, fused with a dead CRISPR-Cas protein or a CRISPR-Cas nickase.

[0773] In some embodiments, the adenosine deaminase comprises a mutation at any one or more of positions T375, V351, G478, S458, H460 of the hADAR2-D amino acid sequence, or a corresponding position in a homologous ADAR protein, optionally in combination a mutation at E488. In some embodiments, the adenosine deaminase comprises one or more of mutations selected from T375G, T375C, T375H, T375Q, V351M, V351T, V351Y, G478R, S458F, H460I, optionally in combination with E488Q.

[0774] In some embodiments, the adenosine deaminase comprises one or more of mutations selected from T375H, T375Q, V351M, V351Y, H460P, optionally in combination with E488Q.

[0775] In some embodiments, the adenosine deaminase comprises mutations T375S and S458F, optionally in combination with E488Q.

[0776] In some embodiments, the adenosine deaminase comprises a mutation at two or more of positions T375, N473, R474, G478, S458, P459, V351, R455, R455, T490, R348, Q479 of the hADAR2-D amino acid sequence, or a corresponding position in a homologous ADAR protein, optionally in combination a mutation at E488. In some embodiments, the adenosine deaminase comprises two or more of mutations selected from T375G, T375S, N473D, R474E, G478R, S458F, P459 W, V351L, R455G, R455S, T490A, R348E, Q479P, optionally in combination with E488Q.

[0777] In some embodiments, the adenosine deaminase comprises mutations T375G and V351L. In some embodiments, the adenosine deaminase comprises mutations T375G and R455G. In some embodiments, the adenosine deaminase comprises mutations T375G and R455S. In some embodiments, the adenosine deaminase comprises mutations T375G and T490A. In some embodiments, the adenosine deaminase comprises mutations T375G and R348E. In some embodiments, the adenosine deaminase comprises mutations T375S and V351L. In some embodiments, the adenosine deaminase comprises mutations T375S and R455G. In some embodiments, the adenosine deaminase comprises mutations T375S and R455S. In some embodiments, the adenosine deaminase comprises mutations T375S and T490A. In some embodiments, the adenosine deaminase comprises mutations T375S and R348E. In some embodiments, the adenosine deaminase comprises mutations N473D and V351L. In some embodiments, the adenosine deaminase comprises mutations N473D and R455G. In some embodiments, the adenosine deaminase comprises mutations N473D and R455S. In some embodiments, the adenosine deaminase comprises mutations N473D and T490A. In some embodiments, the adenosine deaminase comprises mutations N473D and R348E. In some embodiments, the adenosine deaminase comprises mutations R474E and V351L. In some embodiments, the adenosine deaminase comprises mutations R474E and R455G. In some embodiments, the adenosine deaminase comprises mutations R474E and R455S. In some embodiments, the adenosine deaminase comprises mutations R474E and T490A. In some embodiments, the adenosine deaminase comprises mutations R474E and R348E. In some embodiments, the adenosine deaminase comprises mutations S458F and T375G. In some embodiments, the adenosine deaminase comprises mutations S458F and T375S. In some embodiments, the adenosine deaminase comprises mutations S458F and N473D. In some embodiments, the adenosine deaminase comprises mutations S458F and R474E. In some embodiments, the adenosine deaminase comprises mutations S458F and G478R. In some embodiments, the adenosine deaminase comprises mutations G478R and T375G. In some embodiments, the adenosine deaminase comprises mutations G478R and T375S. In some embodiments, the adenosine deaminase comprises mutations G478R and N473D. In some embodiments, the adenosine deaminase comprises mutations G478R and R474E. In some embodiments, the adenosine deaminase comprises mutations P459 W and T375G. In some embodiments, the adenosine deaminase comprises mutations P459 W and T375S. In some embodiments, the adenosine deaminase comprises mutations P459 W and N473D. In some embodiments, the adenosine deaminase comprises mutations P459 W and R474E. In some embodiments, the adenosine deaminase comprises mutations P459 W and G478R. In some embodiments, the adenosine deaminase comprises mutations P459 W and S458F. In some embodiments, the adenosine deaminase comprises mutations Q479P and T375G. In some embodiments, the adenosine deaminase comprises mutations Q479P and T375S. In some embodiments, the adenosine deaminase comprises mutations Q479P and N473D. In some embodiments, the adenosine deaminase comprises mutations Q479P and R474E. In some embodiments, the adenosine deaminase comprises mutations Q479P and G478R. In some embodiments, the adenosine deaminase comprises mutations Q479P and S458F. In some embodiments, the adenosine deaminase comprises mutations Q479P and P459 W. All mutations described in this paragraph may also further be made in combination with a E488Q mutations.

[0778] In some embodiments, the adenosine deaminase comprises a mutation at any one or more of positions K475, Q479, P459, G478, S458 of the hADAR2-D amino acid sequence, or a corresponding position in a homologous ADAR protein, optionally in combination a mutation at E488. In some embodiments, the adenosine deaminase comprises one or more of mutations selected from K475N, Q479N, P459 W, G478R, S458P, S458F, optionally in combination with E488Q.

[0779] In some embodiments, the adenosine deaminase comprises a mutation at any one or more of positions T375, V351, R455, H460, A476 of the hADAR2-D amino acid sequence, or a corresponding position in a homologous ADAR protein, optionally in combination a mutation at E488. In some embodiments, the adenosine deaminase comprises one or more of mutations selected from T375G, T375C, T375H, T375Q, V351M, V351T, V351Y, R455H, H460P, H460I, A476E, optionally in combination with E488Q.

[0780] In certain embodiments, improvement of editing and reduction of off-target modification is achieved by chemical modification of gRNAs. gRNAs which are chemically modified as exemplified in Vogel et al. (2014), Angew Chem Int Ed, 53:6267-6271, doi:10.1002/anie.201402634 (incorporated herein by reference in its entirety) reduce off-target activity and improve on-target efficiency. 2′-O-methyl and phosphothioate modified guide RNAs in general improve editing efficiency in cells.

[0781] ADAR has been known to demonstrate a preference for neighboring nucleotides on either side of the edited A (www.nature.com/nsmb/journal/v23/n5/full/nsmb.3203.html, Matthews et al. (2017), Nature Structural Mol Biol, 23(5): 426-433, incorporated herein by reference in its entirety). Accordingly, in certain embodiments, the gRNA, target, and/or ADAR is selected optimized for motif preference.

[0782] Intentional mismatches have been demonstrated in vitro to allow for editing of non-preferred motifs (academic.oup.com/nar/article-lookup/doi/10.1093/nar/gku272; Schneider et al (2014), Nucleic Acid Res, 42(10):e87); Fukuda et al. (2017), Scientific Reports, 7, doi:10.1038/srep41478, incorporated herein by reference in its entirety). Accordingly, in certain embodiments, to enhance RNA editing efficiency on non-preferred 5′ or 3′ neighboring bases, intentional mismatches in neighboring bases are introduced.

[0783] In some embodiments, the adenosine deaminase may be a tRNA-specific adenosine deaminase or a variant thereof. In some embodiments, the adenosine deaminase may comprise one or more of the mutations: W23L, W23R, R26G, H36L, N37S, P48S, P48T, P48A, I49V, R51L, N72D, L84F, S97C, A106V, D108N, H123Y, G125A, A142N, S146C, D147Y, R152H, R152P, E155V, I156F, K157N, K161T, based on amino acid sequence positions of E. coli TadA, and mutations in a homologous deaminase protein corresponding to the above. In some embodiments, the adenosine deaminase may comprise one or more of the mutations: D108N based on amino acid sequence positions of E. coli TadA, and mutations in a homologous deaminase protein corresponding to the above. In some embodiments, the adenosine deaminase may comprise one or more of the mutations: A106V, D108N, based on amino acid sequence positions of E. coli TadA, and mutations in a homologous deaminase protein corresponding to the above. In some embodiments, the adenosine deaminase may comprise one or more of the mutations: A106V, D108N, D147Y, E155V, based on amino acid sequence positions of E. coli TadA, and mutations in a homologous deaminase protein corresponding to the above. In some embodiments, the adenosine deaminase may comprise one or more of the mutations: A106V, D108N, based on amino acid sequence positions of E. coli TadA, and mutations in a homologous deaminase protein corresponding to the above. In some embodiments, the adenosine deaminase may comprise one or more of the mutations: A106V, D108N, D147Y, E155V, L84F, H123Y, 1156F, based on amino acid sequence positions of E. coli TadA, and mutations in a homologous deaminase protein corresponding to the above. In some embodiments, the adenosine deaminase may comprise one or more of the mutations: A106V, D108N, D147Y, E155V, L84F, H123Y, I156F, A142N, based on amino acid sequence positions of E. coli TadA, and mutations in a homologous deaminase protein corresponding to the above. In some embodiments, the adenosine deaminase may comprise one or more of the mutations: A106V, D108N, D147Y, E155V, L84F, H123Y, I156F, H36L, R51L, S146C, K157N, based on amino acid sequence positions of E. coli TadA, and mutations in a homologous deaminase protein corresponding to the above. In some embodiments, the adenosine deaminase may comprise one or more of the mutations: A106V, D108N, D147Y, E155V, L84F, H123Y, I156F, H36L, R51L, S146C, K157N, P48S, based on amino acid sequence positions of E. coli TadA, and mutations in a homologous deaminase protein corresponding to the above. In some embodiments, the adenosine deaminase may comprise one or more of the mutations: A106V, D108N, D147Y, E155V, L84F, H123Y, I156F, H36L, R51L, S146C, K157N, P48S, A142N, based on amino acid sequence positions of E. coli TadA, and mutations in a homologous deaminase protein corresponding to the above. In some embodiments, the adenosine deaminase may comprise one or more of the mutations: A106V, D108N, D147Y, E155V, L84F, H123Y, I156F, H36L, R51L, S146C, K157N, P48S, W23R, P48A, based on amino acid sequence positions of E. coli TadA, and mutations in a homologous deaminase protein corresponding to the above. In some embodiments, the adenosine deaminase may comprise one or more of the mutations: A106V, D108N, D147Y, E155V, L84F, H123Y, I156F, H36L, R51L, S146C, K157N, P48S, W23R, P48A, A142N, based on amino acid sequence positions of E. coli TadA, and mutations in a homologous deaminase protein corresponding to the above. In some embodiments, the adenosine deaminase may comprise one or more of the mutations: A106V, D108N, D147Y, E155V, L84F, H123Y, I156F, H36L, R51L, S146C, K157N, P48S, W23R, P48A, R152P, based on amino acid sequence positions of E. coli TadA, and mutations in a homologous deaminase protein corresponding to the above. In some embodiments, the adenosine deaminase may comprise one or more of the mutations: A106V, D108N, D147Y, E155V, L84F, H123Y, I156F, H36L, R51L, S146C, K157N, P48S, W23R, P48A, R152P, A142N, based on amino acid sequence positions of E. coli TadA, and mutations in a homologous deaminase protein corresponding to the above.

[0784] Results suggest that A's opposite C's in the targeting window of the ADAR deaminase domain are preferentially edited over other bases. Additionally, A's base-paired with U's within a few bases of the targeted base show low levels of editing by Cas-ADAR fusions, suggesting that there is flexibility for the enzyme to edit multiple A's. These two observations suggest that multiple A's in the activity window of Cas-ADAR fusions could be specified for editing by mismatching all A's to be edited with C's. Accordingly, in certain embodiments, multiple A:C mismatches in the activity window are designed to create multiple A:I edits. In certain embodiments, to suppress potential off-target editing in the activity window, non-target A's are paired with A's or G's.

[0785] The terms “editing specificity” and “editing preference” are used interchangeably herein to refer to the extent of A-to-I editing at a particular adenosine site in a double-stranded substrate. In some embodiment, the substrate editing preference is determined by the 5′ nearest neighbor and/or the 3′ nearest neighbor of the target adenosine residue. In some embodiments, the adenosine deaminase has preference for the 5′ nearest neighbor of the substrate ranked as U>A>C>G (“>” indicates greater preference). In some embodiments, the adenosine deaminase has preference for the 3′ nearest neighbor of the substrate ranked as G>C˜A>U (“>” indicates greater preference; “˜” indicates similar preference). In some embodiments, the adenosine deaminase has preference for the 3′ nearest neighbor of the substrate ranked as G>C>U˜A (“>” indicates greater preference; “˜” indicates similar preference). In some embodiments, the adenosine deaminase has preference for the 3′ nearest neighbor of the substrate ranked as G>C>A>U (“>” indicates greater preference). In some embodiments, the adenosine deaminase has preference for the 3′ nearest neighbor of the substrate ranked as C˜G˜A>U (“>” indicates greater preference; “˜” indicates similar preference). In some embodiments, the adenosine deaminase has preference for a triplet sequence containing the target adenosine residue ranked as TAG>AAG>CAC>AAT>GAA>GAC (“>” indicates greater preference), the center A being the target adenosine residue.

[0786] In some embodiments, the substrate editing preference of an adenosine deaminase is affected by the presence or absence of a nucleic acid binding domain in the adenosine deaminase protein. In some embodiments, to modify substrate editing preference, the deaminase domain is connected with a double-strand RNA binding domain (dsRBD) or a double-strand RNA binding motif (dsRBM). In some embodiments, the dsRBD or dsRBM may be derived from an ADAR protein, such as hADAR1 or hADAR2. In some embodiments, a full length ADAR protein that comprises at least one dsRBD and a deaminase domain is used. In some embodiments, the one or more dsRBM or dsRBD is at the N-terminus of the deaminase domain. In other embodiments, the one or more dsRBM or dsRBD is at the C-terminus of the deaminase domain.

[0787] In some embodiments, the substrate editing preference of an adenosine deaminase is affected by amino acid residues near or in the active center of the enzyme. In some embodiments, to modify substrate editing preference, the adenosine deaminase may comprise one or more of the mutations: G336D, G487R, G487K, G487 W, G487Y, E488Q, E488N, T490A, V493A, V493T, V493S, N597K, N597R, A589V, S599T, N613K, N613R, based on amino acid sequence positions of hADAR2-D, and mutations in a homologous ADAR protein corresponding to the above.

[0788] Particularly, in some embodiments, to reduce editing specificity, the adenosine deaminase can comprise one or more of mutations E488Q, V493A, N597K, N613K, based on amino acid sequence positions of hADAR2-D, and mutations in a homologous ADAR protein corresponding to the above. In some embodiments, to increase editing specificity, the adenosine deaminase can comprise mutation T490A.

[0789] In some embodiments, to increase editing preference for target adenosine (A) with an immediate 5′ G, such as substrates comprising the triplet sequence GAC, the center A being the target adenosine residue, the adenosine deaminase can comprise one or more of mutations G336D, E488Q, E488N, V493T, V493S, V493A, A589V, N597K, N597R, S599T, N613K, N613R, based on amino acid sequence positions of hADAR2-D, and mutations in a homologous ADAR protein corresponding to the above.

[0790] Particularly, in some embodiments, the adenosine deaminase comprises mutation E488Q or a corresponding mutation in a homologous ADAR protein for editing substrates comprising the following triplet sequences: GAC, GAA, GAU, GAG, CAU, AAU, UAC, the center A being the target adenosine residue.

[0791] In some embodiments, the adenosine deaminase comprises the wild-type amino acid sequence of hADAR1-D as defined in SEQ ID No. 761. In some embodiments, the adenosine deaminase comprises one or more mutations in the hADAR1-D sequence, such that the editing efficiency, and/or substrate editing preference of hADAR1-D is changed according to specific needs.

[0792] In some embodiments, the adenosine deaminase comprises a mutation at Glycine1007 of the hADAR1-D amino acid sequence, or a corresponding position in a homologous ADAR protein. In some embodiments, the glycine residue at position 1007 is replaced by a non-polar amino acid residue with relatively small side chains. For example, in some embodiments, the glycine residue at position 1007 is replaced by an alanine residue (G1007A). In some embodiments, the glycine residue at position 1007 is replaced by a valine residue (G1007V). In some embodiments, the glycine residue at position 1007 is replaced by an amino acid residue with relatively large side chains. In some embodiments, the glycine residue at position 1007 is replaced by an arginine residue (G1007R). In some embodiments, the glycine residue at position 1007 is replaced by a lysine residue (G1007K). In some embodiments, the glycine residue at position 1007 is replaced by a tryptophan residue (G1007 W). In some embodiments, the glycine residue at position 1007 is replaced by a tyrosine residue (G1007Y). Additionally, in other embodiments, the glycine residue at position 1007 is replaced by a leucine residue (G1007L). In other embodiments, the glycine residue at position 1007 is replaced by a threonine residue (G1007T). In other embodiments, the glycine residue at position 1007 is replaced by a serine residue (G1007S).

[0793] In some embodiments, the adenosine deaminase comprises a mutation at glutamic acid1008 of the hADAR1-D amino acid sequence, or a corresponding position in a homologous ADAR protein. In some embodiments, the glutamic acid residue at position 1008 is replaced by a polar amino acid residue having a relatively large side chain. In some embodiments, the glutamic acid residue at position 1008 is replaced by a glutamine residue (E1008Q). In some embodiments, the glutamic acid residue at position 1008 is replaced by a histidine residue (E1008H). In some embodiments, the glutamic acid residue at position 1008 is replaced by an arginine residue (E1008R). In some embodiments, the glutamic acid residue at position 1008 is replaced by a lysine residue (E1008K). In some embodiments, the glutamic acid residue at position 1008 is replaced by a nonpolar or small polar amino acid residue. In some embodiments, the glutamic acid residue at position 1008 is replaced by a phenylalanine residue (E1008F). In some embodiments, the glutamic acid residue at position 1008 is replaced by a tryptophan residue (E1008 W). In some embodiments, the glutamic acid residue at position 1008 is replaced by a glycine residue (E1008G). In some embodiments, the glutamic acid residue at position 1008 is replaced by an isoleucine residue (E1008I). In some embodiments, the glutamic acid residue at position 1008 is replaced by a valine residue (E1008V). In some embodiments, the glutamic acid residue at position 1008 is replaced by a proline residue (E1008P). In some embodiments, the glutamic acid residue at position 1008 is replaced by a serine residue (E1008S). In other embodiments, the glutamic acid residue at position 1008 is replaced by an asparagine residue (E1008N). In other embodiments, the glutamic acid residue at position 1008 is replaced by an alanine residue (E1008A). In other embodiments, the glutamic acid residue at position 1008 is replaced by a Methionine residue (E1008M). In some embodiments, the glutamic acid residue at position 1008 is replaced by a leucine residue (E1008L).

[0794] In some embodiments, to improve editing efficiency, the adenosine deaminase may comprise one or more of the mutations: E1007S, E1007A, E1007V, E1008Q, E1008R, E1008H, E1008M, E1008N, E1008K, based on amino acid sequence positions of hADAR1-D, and mutations in a homologous ADAR protein corresponding to the above.

[0795] In some embodiments, to reduce editing efficiency, the adenosine deaminase may comprise one or more of the mutations: E1007R, E1007K, E1007Y, E1007L, E1007T, E1008G, E1008I, E1008P, E1008V, E1008F, E1008 W, E1008S, E1008N, E1008K, based on amino acid sequence positions of hADAR1-D, and mutations in a homologous ADAR protein corresponding to the above.

[0796] In some embodiments, the substrate editing preference, efficiency and/or selectivity of an adenosine deaminase is affected by amino acid residues near or in the active center of the enzyme. In some embodiments, the adenosine deaminase comprises a mutation at the glutamic acid 1008 position in hADAR1-D sequence, or a corresponding position in a homologous ADAR protein. In some embodiments, the mutation is E1008R, or a corresponding mutation in a homologous ADAR protein. In some embodiments, the E1008R mutant has an increased editing efficiency for target adenosine residue that has a mismatched G residue on the opposite strand.

[0797] In some embodiments, the adenosine deaminase protein further comprises or is connected to one or more double-stranded RNA (dsRNA) binding motifs (dsRBMs) or domains (dsRBDs) for recognizing and binding to double-stranded nucleic acid substrates. In some embodiments, the interaction between the adenosine deaminase and the double-stranded substrate is mediated by one or more additional protein factor(s), including a CRISPR/CAS protein factor. In some embodiments, the interaction between the adenosine deaminase and the double-stranded substrate is further mediated by one or more nucleic acid component(s), including a guide RNA.

[0798] In certain example embodiments, directed evolution may be used to design modified ADAR proteins capable of catalyzing additional reactions besides deamination of a adenine to a hypoxanthine.

### Modified Adenosine Deaminase Having C to U Deamination Activity

[0799] In certain example embodiments, directed evolution may be used to design modified ADAR proteins capable of catalyzing additional reactions besides deamination of an adenine to a hypoxanthine. For example, the modified ADAR protein may be capable of catalyzing deamination of a cytidine to a uracil. While not bound by a particular theory, mutations that improve C to U activity may alter the shape of the binding pocket to be more amenable to the smaller cytidine base.

[0800] In some embodiments, the modified adenosine deaminase having C-to-U deamination activity comprises a mutation at any one or more of positions V351, T375, R455, and E488 of the hADAR2-D amino acid sequence, or a corresponding position in a homologous ADAR protein. In some embodiments, the adenosine deaminase comprises mutation E488Q. In some embodiments, the adenosine deaminase comprises one or more of mutations selected from V351I, V351L, V351F, V351M, V351C, V351A, V351G, V351P, V351T, V351S, V351Y, V351 W, V351Q, V351N, V351H, V351E, V351D, V351K, V351R, T375I, T375L, T375V, T375F, T375M, T375C, T375A, T375G, T375P, T375S, T375Y, T375 W, T375Q, T375N, T375H, T375E, T375D, T375K, T375R, R455I, R455L, R455V, R455F, R455M, R455C, R455A, R455G, R455P, R455T, R455S, R455Y, R455 W, R455Q, R455N, R455H, R455E, R455D, R455K. In some embodiments, the adenosine deaminase comprises mutation E488Q, and further comprises one or more of mutations selected from V351I, V351L, V351F, V351M, V351C, V351A, V351G, V351P, V351T, V351S, V351Y, V351 W, V351Q, V351N, V351H, V351E, V351D, V351K, V351R, T375I, T375L, T375V, T375F, T375M, T375C, T375A, T375G, T375P, T375S, T375Y, T375 W, T375Q, T375N, T375H, T375E, T375D, T375K, T375R, R455I, R455L, R455V, R455F, R455M, R455C, R455A, R455G, R455P, R455T, R455S, R455Y, R455 W, R455Q, R455N, R455H, R455E, R455D, R455K.

[0801] In connection with the aforementioned modified ADAR protein having C-to-U deamination activity, the invention described herein also relates to a method for deaminating a C in a target RNA sequence of interest, comprising delivering to a target RNA or DNA an AD-functionalized composition disclosed herein.

[0802] In certain example embodiments, the method for deaminating a C in a target RNA sequence comprising delivering to said target RNA: (a) a catalytically inactive (dead) Cas; (b) a guide molecule which comprises a guide sequence linked to a direct repeat sequence; and (c) a modified ADAR protein having C-to-U deamination activity or catalytic domain thereof; wherein said modified ADAR protein or catalytic domain thereof is covalently or non-covalently linked to said dead Cas protein or said guide molecule or is adapted to link thereto after delivery; wherein guide molecule forms a complex with said dead Cas protein and directs said complex to bind said target RNA sequence of interest; wherein said guide sequence is capable of hybridizing with a target sequence comprising said C to form an RNA duplex; wherein, optionally, said guide sequence comprises a non-pairing A or U at a position corresponding to said C resulting in a mismatch in the RNA duplex formed; and wherein said modified ADAR protein or catalytic domain thereof deaminates said C in said RNA duplex.

[0803] In connection with the aforementioned modified ADAR protein having C-to-U deamination activity, the invention described herein further relates to an engineered, non-naturally occurring system suitable for deaminating a C in a target locus of interest, comprising: (a) a guide molecule which comprises a guide sequence linked to a direct repeat sequence, or a nucleotide sequence encoding said guide molecule; (b) a catalytically inactive Cas protein, or a nucleotide sequence encoding said catalytically inactive Cas protein; (c) a modified ADAR protein having C-to-U deamination activity or catalytic domain thereof, or a nucleotide sequence encoding said modified ADAR protein or catalytic domain thereof; wherein said modified ADAR protein or catalytic domain thereof is covalently or non-covalently linked to said Cas protein or said guide molecule or is adapted to link thereto after delivery; wherein said guide sequence is capable of hybridizing with a target RNA sequence comprising a C to form an RNA duplex; wherein, optionally, said guide sequence comprises a non-pairing A or U at a position corresponding to said C resulting in a mismatch in the RNA duplex formed; wherein, optionally, the system is a vector system comprising one or more vectors comprising: (a) a first regulatory element operably linked to a nucleotide sequence encoding said guide molecule which comprises said guide sequence, (b) a second regulatory element operably linked to a nucleotide sequence encoding said catalytically inactive Cas protein; and (c) a nucleotide sequence encoding a modified ADAR protein having C-to-U deamination activity or catalytic domain thereof which is under control of said first or second regulatory element or operably linked to a third regulatory element; wherein, if said nucleotide sequence encoding a modified ADAR protein or catalytic domain thereof is operably linked to a third regulatory element, said modified ADAR protein or catalytic domain thereof is adapted to link to said guide molecule or said Cas protein after expression; wherein components (a), (b) and (c) are located on the same or different vectors of the system, optionally wherein said first, second, and/or third regulatory element is an inducible promoter.

[0804] In an embodiment of the invention, the substrate of the adenosine deaminase is an RNA/DNA heteroduplex formed upon binding of the guide molecule to its DNA target which then forms the CRISPR-Cas complex with the CRISPR-Cas enzyme. The RNA/DNA or DNA/RNA heteroduplex is also referred to herein as the “RNA/DNA hybrid”, “DNA/RNA hybrid” or “double-stranded substrate”.

[0805] According to the present invention, the substrate of the adenosine deaminase is an RNA/DNAn RNA duplex formed upon binding of the guide molecule to its DNA target which then forms the CRISPR-Cas complex with the CRISPR-Cas enzyme. The substrate of the adenosine deaminase can also be an RNA/RNA duplex formed upon binding of the guide molecule to its RNA target which then forms the CRISPR-Cas complex with the CRISPR-Cas enzyme. The RNA/DNA or DNA/RNAn RNA duplex is also referred to herein as the “RNA/DNA hybrid”, “DNA/RNA hybrid” or “double-stranded substrate”. The particular features of the guide molecule and CRISPR-Cas enzyme are detailed below.

[0806] The term “editing selectivity” as used herein refers to the fraction of all sites on a double-stranded substrate that is edited by an adenosine deaminase. Without being bound by theory, it is contemplated that editing selectivity of an adenosine deaminase is affected by the double-stranded substrate's length and secondary structures, such as the presence of mismatched bases, bulges and/or internal loops.

[0807] In some embodiments, when the substrate is a perfectly base-paired duplex longer than 50 bp, the adenosine deaminase may be able to deaminate multiple adenosine residues within the duplex (e.g., 50% of all adenosine residues). In some embodiments, when the substrate is shorter than 50 bp, the editing selectivity of an adenosine deaminase is affected by the presence of a mismatch at the target adenosine site. Particularly, in some embodiments, adenosine (A) residue having a mismatched cytidine (C) residue on the opposite strand is deaminated with high efficiency. In some embodiments, adenosine (A) residue having a mismatched guanosine (G) residue on the opposite strand is skipped without editing.

[0808] In particular embodiments, the adenosine deaminase protein or catalytic domain thereof is delivered to the cell or expressed within the cell as a separate protein, but is modified so as to be able to link to either the Cas protein or the guide molecule. In particular embodiments, this is ensured by the use of orthogonal RNA-binding protein or adaptor protein/aptamer combinations that exist within the diversity of bacteriophage coat proteins. Examples of such coat proteins include but are not limited to: MS2, Qβ, F2, GA, fr, JP501, M12, R17, BZ13, JP34, JP500, KU1, M11, MX1, TW18, VK, SP, FI, ID2, NL95, TW19, AP205, ϕCb5, ϕCb8r, ϕCb12r, ϕCb23r, 7s and PRR1. Aptamers can be naturally occurring or synthetic oligonucleotides that have been engineered through repeated rounds of in vitro selection or SELEX (systematic evolution of ligands by exponential enrichment) to bind to a specific target.

[0809] In particular embodiments, the guide molecule is provided with one or more distinct RNA loop(s) or distinct sequence(s) that can recruit an adaptor protein. A guide molecule may be extended, without colliding with the Cas protein by the insertion of distinct RNA loop(s) or distinct sequence(s) that may recruit adaptor proteins that can bind to the distinct RNA loop(s) or distinct sequence(s). Examples of modified guides and their use in recruiting effector domains to the Cas complex are provided in Konermann (Nature 2015, 517(7536): 583-588). In particular embodiments, the aptamer is a minimal hairpin aptamer which selectively binds dimerized MS2 bacteriophage coat proteins in mammalian cells and is introduced into the guide molecule, such as in the stemloop and/or in a tetraloop. In these embodiments, the adenosine deaminase protein is fused to MS2. The adenosine deaminase protein is then co-delivered together with the Cas protein and corresponding guide RNA.

[0810] In some embodiments, the Cas-ADAR base editing system described herein comprises (a) a Cas protein, which is catalytically inactive or a nickase; (b) a guide molecule which comprises a guide sequence; and (c) an adenosine deaminase protein or catalytic domain thereof; wherein the adenosine deaminase protein or catalytic domain thereof is covalently or non-covalently linked to the Cas protein or the guide molecule or is adapted to link thereto after delivery; wherein the guide sequence is substantially complementary to the target sequence but comprises a non-pairing C corresponding to the A being targeted for deamination, resulting in a A-C mismatch in a DNA-RNA or RNA-RNA duplex formed by the guide sequence and the target sequence. For application in eukaryotic cells, the Cas protein and/or the adenosine deaminase are preferably NLS-tagged.

[0811] In some embodiments, the components (a), (b) and (c) are delivered to the cell as a ribonucleoprotein complex. The ribonucleoprotein complex can be delivered via one or more lipid nanoparticles.

[0812] In some embodiments, the components (a), (b) and (c) are delivered to the cell as one or more RNA molecules, such as one or more guide RNAs and one or more mRNA molecules encoding the Cas protein, the adenosine deaminase protein, and optionally the adaptor protein. The RNA molecules can be delivered via one or more lipid nanoparticles.

[0813] In some embodiments, the components (a), (b) and (c) are delivered to the cell as one or more DNA molecules. In some embodiments, the one or more DNA molecules are comprised within one or more vectors such as viral vectors (e.g., AAV). In some embodiments, the one or more DNA molecules comprise one or more regulatory elements operably configured to express the Cas protein, the guide molecule, and the adenosine deaminase protein or catalytic domain thereof, optionally wherein the one or more regulatory elements comprise inducible promoters.

[0814] In some embodiments of the guide molecule is capable of hybridizing with a target sequence comprising the Adenine to be deaminated within a first DNA strand or a RNA strand at the target locus to form a DNA-RNA or RNA-RNA duplex which comprises a non-pairing Cytosine opposite to said Adenine. Upon duplex formation, the guide molecule forms a complex with the Cas protein and directs the complex to bind said first DNA strand or said RNA strand at the target locus of interest. Details on the aspect of the guide of the Cas-ADAR base editing system are provided herein below.

[0815] In some embodiments, a Cas guide RNA having a canonical length (e.g., about 20 nt for AacC2c1) is used to form a DNA-RNA or RNA-RNA duplex with the target DNA or RNA. In some embodiments, a Cas guide molecule longer than the canonical length (e.g., >20 nt for AacC2c1) is used to form a DNA-RNA or RNA-RNA duplex with the target DNA or RNA including outside of the Cas-guide RNA-target DNA complex. In certain example embodiments, the guide sequence has a length of about 29-53 nt capable of forming a DNA-RNA or RNA-RNA duplex with said target sequence. In certain other example embodiments, the guide sequence has a length of about 40-50 nt capable of forming a DNA-RNA or RNA-RNA duplex with said target sequence. In certain example embodiments, the distance between said non-pairing C and the 5′ end of said guide sequence is 20-30 nucleotides. In certain example embodiments, the distance between said non-pairing C and the 3′ end of said guide sequence is 20-30 nucleotides.

[0816] In at least a first design, the Cas-ADAR system comprises (a) an adenosine deaminase fused or linked to a Cas protein, wherein the Cas protein is catalytically inactive or a nickase, and (b) a guide molecule comprising a guide sequence designed to introduce a A-C mismatch in a DNA-RNA or RNA-RNA duplex formed between the guide sequence and the target sequence. In some embodiments, the Cas protein and/or the adenosine deaminase are NLS-tagged, on either the N- or C-terminus or both.

[0817] In at least a second design, the Cas-ADAR system comprises (a) a Cas protein that is catalytically inactive or a nickase, (b) a guide molecule comprising a guide sequence designed to introduce a A-C mismatch in a DNA-RNA or RNA-RNA duplex formed between the guide sequence and the target sequence, and an aptamer sequence (e.g., MS2 RNA motif or PP7 RNA motif) capable of binding to an adaptor protein (e.g., MS2 coating protein or PP7 coat protein), and (c) an adenosine deaminase fused or linked to an adaptor protein, wherein the binding of the aptamer and the adaptor protein recruits the adenosine deaminase to the DNA-RNA or RNA-RNA duplex formed between the guide sequence and the target sequence for targeted deamination at the A of the A-C mismatch. In some embodiments, the adaptor protein and/or the adenosine deaminase are NLS-tagged, on either the N- or C-terminus or both. The Cas protein can also be NLS-tagged.

[0818] The use of different aptamers and corresponding adaptor proteins also allows orthogonal gene editing to be implemented. In one example in which adenosine deaminase are used in combination with cytidine deaminase for orthogonal gene editing/deamination, sgRNA targeting different loci are modified with distinct RNA loops in order to recruit MS2-adenosine deaminase and PP7-cytidine deaminase (or PP7-adenosine deaminase and MS2-cytidine deaminase), respectively, resulting in orthogonal deamination of A or C at the target loci of interested, respectively. PP7 is the RNA-binding coat protein of the bacteriophage Pseudomonas. Like MS2, it binds a specific RNA sequence and secondary structure. The PP7 RNA-recognition motif is distinct from that of MS2. Consequently, PP7 and MS2 can be multiplexed to mediate distinct effects at different genomic loci simultaneously. For example, an sgRNA targeting locus A can be modified with MS2 loops, recruiting MS2-adenosine deaminase, while another sgRNA targeting locus B can be modified with PP7 loops, recruiting PP7-cytidine deaminase. In the same cell, orthogonal, locus-specific modifications are thus realized. This principle can be extended to incorporate other orthogonal RNA-binding proteins.

[0819] In at least a third design, the Cas-ADAR CRISPR system comprises (a) an adenosine deaminase inserted into an internal loop or unstructured region of a Cas protein, wherein the Cas protein is catalytically inactive or a nickase, and (b) a guide molecule comprising a guide sequence designed to introduce a A-C mismatch in a DNA-RNA or RNA-RNA duplex formed between the guide sequence and the target sequence.

[0820] Cas protein split sites that are suitable for insertion of adenosine deaminase can be identified with the help of a crystal structure. For example, with respect to AacC2c1 mutants, it should be readily apparent what the corresponding position for, for example, a sequence alignment. For other Cas protein one can use the crystal structure of an ortholog if a relatively high degree of homology exists between the ortholog and the intended Cas protein.

[0821] The split position may be located within a region or loop. Preferably, the split position occurs where an interruption of the amino acid sequence does not result in the partial or full destruction of a structural feature (e.g. alpha-helixes or β-sheets). Unstructured regions (regions that did not show up in the crystal structure because these regions are not structured enough to be “frozen” in a crystal) are often preferred options. Splits in all unstructured regions that are exposed on the surface of Cas are envisioned in the practice of the invention. The positions within the unstructured regions or outside loops may not need to be exactly the numbers provided above, but may vary by, for example 1, 2, 3, 4, 5, 6, 7, 8, 9, or even 10 amino acids either side of the position given above, depending on the size of the loop, so long as the split position still falls within an unstructured region of outside loop.

[0822] The Cas-ADAR system described herein can be used to target a specific Adenine within a DNA sequence for deamination. For example, the guide molecule can form a complex with the Cas protein and directs the complex to bind a target sequence at the target locus of interest. Because the guide sequence is designed to have a non-pairing C, the heteroduplex formed between the guide sequence and the target sequence comprises a A-C mismatch, which directs the adenosine deaminase to contact and deaminate the A opposite to the non-pairing C, converting it to a Inosine (I). Since Inosine (I) base pairs with C and functions like G in cellular process, the targeted deamination of A described herein are useful for correction of undesirable G-A and C-T mutations, as well as for obtaining desirable A-G and T-C mutations.

### Base Excision Repair Inhibitor

[0823] In some embodiments, the AD-functionalized CRISPR system further comprises a base excision repair (BER) inhibitor. Without wishing to be bound by any particular theory, cellular DNA-repair response to the presence of I:T pairing may be responsible for a decrease in nucleobase editing efficiency in cells. Alkyladenine DNA glycosylase (also known as DNA-3-methyladenine glycosylase, 3-alkyladenine DNA glycosylase, or N-methylpurine DNA glycosylase) catalyzes removal of hypoxanthine from DNA in cells, which may initiate base excision repair, with reversion of the I:T pair to a A:T pair as outcome.

[0824] In some embodiments, the BER inhibitor is an inhibitor of alkyladenine DNA glycosylase. In some embodiments, the BER inhibitor is an inhibitor of human alkyladenine DNA glycosylase. In some embodiments, the BER inhibitor is a polypeptide inhibitor. In some embodiments, the BER inhibitor is a protein that binds hypoxanthine. In some embodiments, the BER inhibitor is a protein that binds hypoxanthine in DNA. In some embodiments, the BER inhibitor is a catalytically inactive alkyladenine DNA glycosylase protein or binding domain thereof. In some embodiments, the BER inhibitor is a catalytically inactive alkyladenine DNA glycosylase protein or binding domain thereof that does not excise hypoxanthine from the DNA. Other proteins that are capable of inhibiting (e.g., sterically blocking) an alkyladenine DNA glycosylase base-excision repair enzyme are within the scope of this disclosure. Additionally, any proteins that block or inhibit base-excision repair as also within the scope of this disclosure.

[0825] Without wishing to be bound by any particular theory, base excision repair may be inhibited by molecules that bind the edited strand, block the edited base, inhibit alkyladenine DNA glycosylase, inhibit base excision repair, protect the edited base, and/or promote fixing of the non-edited strand. It is believed that the use of the BER inhibitor described herein can increase the editing efficiency of an adenosine deaminase that is capable of catalyzing a A to I change.

[0826] Accordingly, in the first design of the AD-functionalized CRISPR system discussed above, the CRISPR-Cas protein or the adenosine deaminase can be fused to or linked to a BER inhibitor (e.g., an inhibitor of alkyladenine DNA glycosylase). In some embodiments, the BER inhibitor can be comprised in one of the following structures (nCas=Cas nickase; dCas=dead Cas): [AD]-[optional linker]-[nCas/dCas]-[optional linker]-[BER inhibitor]; [AD]-[optional linker]-[BER inhibitor]-[optional linker]-[nCas/dCas]; [BER inhibitor]-[optional linker]-[AD]-[optional linker]-[nCas/dCas]; [BER inhibitor]-[optional linker]-[nCas/dCas]-[optional linker]-[AD]; [nCas/dCas]-[optional linker]-[AD]-[optional linker]-[BER inhibitor]; [nCas/dCas]-[optional linker]-[BER inhibitor]-[optional linker]-[AD].

[0827] Similarly, in the second design of the AD-functionalized CRISPR system discussed above, the CRISPR-Cas protein, the adenosine deaminase, or the adaptor protein can be fused to or linked to a BER inhibitor (e.g., an inhibitor of alkyladenine DNA glycosylase). In some embodiments, the BER inhibitor can be comprised in one of the following structures (nCas=Cas nickase; dCas=dead Cas): [nCas/dCas]-[optional linker]-[BER inhibitor]; [BER inhibitor]-[optional linker]-[nCas/dCas]; [AD]-[optional linker]-[Adaptor]-[optional linker]-[BER inhibitor]; [AD]-[optional linker]-[BER inhibitor]-[optional linker]-[Adaptor]; [BER inhibitor]-[optional linker]-[AD]-[optional linker]-[Adaptor]; [BER inhibitor]-[optional linker]-[Adaptor]-[optional linker]-[AD]; [Adaptor]-[optional linker]-[AD]-[optional linker]-[BER inhibitor]; [Adaptor]-[optional linker]-[BER inhibitor]-[optional linker]-[AD].

[0828] In the third design of the AD-functionalized CRISPR system discussed above, the BER inhibitor can be inserted into an internal loop or unstructured region of a CRISPR-Cas protein.

### Cytidine Deaminase

[0829] In some embodiments, the deaminase is a cytidine deaminase. The term “cytidine deaminase” or “cytidine deaminase protein” as used herein refers to a protein, a polypeptide, or one or more functional domain(s) of a protein or a polypeptide that is capable of catalyzing a hydrolytic deamination reaction that converts a cytosine (or a cytosine moiety of a molecule) to an uracil (or a uracil moiety of a molecule), as shown below. In some embodiments, the cytosine-containing molecule is an cytidine (C), and the uracil-containing molecule is an uridine (U). The cytosine-containing molecule can be deoxyribonucleic acid (DNA) or ribonucleic acid (RNA).

[chemical structure]

[0830] According to the present disclosure, cytidine deaminases that can be used in connection with the present disclosure include, but are not limited to, members of the enzyme family known as apolipoprotein B mRNA-editing complex (APOBEC) family deaminase, an activation-induced deaminase (AID), or a cytidine deaminase 1 (CDA1). In particular embodiments, the deaminase in an APOBEC1 deaminase, an APOBEC2 deaminase, an APOBEC3A deaminase, an APOBEC3B deaminase, an APOBEC3C deaminase, and APOBEC3D deaminase, an APOBEC3E deaminase, an APOBEC3F deaminase an APOBEC3G deaminase, an APOBEC3H deaminase, or an APOBEC4 deaminase.

[0831] In the methods and systems of the present invention, the cytidine deaminase is capable of targeting Cytosine in a DNA single strand. In certain example embodiments the cytidine deaminase may edit on a single strand present outside of the binding component e.g. bound Cas. In other example embodiments, the cytidine deaminase may edit at a localized bubble, such as a localized bubble formed by a mismatch at the target edit site but the guide sequence. In certain example embodiments the cytidine deaminase may contain mutations that help focus the area of activity such as those disclosed in Kim et al., Nature Biotechnology (2017) 35(4):371-377 (doi:10.1038/nbt.3803.

[0832] In some embodiments, the cytidine deaminase is derived from one or more metazoa species, including but not limited to, mammals, birds, frogs, squids, fish, flies and worms. In some embodiments, the cytidine deaminase is a human, primate, cow, dog rat or mouse cytidine deaminase.

[0833] In some embodiments, the cytidine deaminase is a human APOBEC, including hAPOBEC1 or hAPOBEC3. In some embodiments, the cytidine deaminase is a human AID.

[0834] In some embodiments, the cytidine deaminase protein recognizes and converts one or more target cytosine residue(s) in a single-stranded bubble of a RNA duplex into uracil residues (s). In some embodiments, the cytidine deaminase protein recognizes a binding window on the single-stranded bubble of a RNA duplex. In some embodiments, the binding window contains at least one target cytosine residue(s). In some embodiments, the binding window is in the range of about 3 bp to about 100 bp. In some embodiments, the binding window is in the range of about 5 bp to about 50 bp. In some embodiments, the binding window is in the range of about 10 bp to about 30 bp. In some embodiments, the binding window is about 1 bp, 2 bp, 3 bp, 5 bp, 7 bp, 10 bp, 15 bp, 20 bp, 25 bp, 30 bp, 40 bp, 45 bp, 50 bp, 55 bp, 60 bp, 65 bp, 70 bp, 75 bp, 80 bp, 85 bp, 90 bp, 95 bp, or 100 bp.

[0835] In some embodiments, the cytidine deaminase protein comprises one or more deaminase domains. Not intended to be bound by theory, it is contemplated that the deaminase domain functions to recognize and convert one or more target cytosine (C) residue(s) contained in a single-stranded bubble of a RNA duplex into (an) uracil (U) residue (s). In some embodiments, the deaminase domain comprises an active center. In some embodiments, the active center comprises a zinc ion. In some embodiments, amino acid residues in or near the active center interact with one or more nucleotide(s) 5′ to a target cytosine residue. In some embodiments, amino acid residues in or near the active center interact with one or more nucleotide(s) 3′ to a target cytosine residue.

[0836] In some embodiments, the cytidine deaminase comprises human APOBEC1 full protein (hAPOBEC1) or the deaminase domain thereof (hAPOBEC1-D) or a C-terminally truncated version thereof (hAPOBEC-T). In some embodiments, the cytidine deaminase is an APOBEC family member that is homologous to hAPOBEC1, hAPOBEC-D or hAPOBEC-T. In some embodiments, the cytidine deaminase comprises human AID1 full protein (hAID) or the deaminase domain thereof (hAID-D) or a C-terminally truncated version thereof (hAID-T). In some embodiments, the cytidine deaminase is an AID family member that is homologous to hAID, hAID-D or hAID-T. In some embodiments, the hAID-T is a hAID which is C-terminally truncated by about 20 amino acids.

[0837] In some embodiments, the cytidine deaminase comprises the wild-type amino acid sequence of a cytosine deaminase. In some embodiments, the cytidine deaminase comprises one or more mutations in the cytosine deaminase sequence, such that the editing efficiency, and/or substrate editing preference of the cytosine deaminase is changed according to specific needs.

[0838] Certain mutations of APOBEC1 and APOBEC3 proteins have been described in Kim et al., Nature Biotechnology (2017) 35(4):371-377 (doi:10.1038/nbt.3803); and Harris et al. Mol. Cell (2002) 10:1247-1253, each of which is incorporated herein by reference in its entirety.

[0839] In some embodiments, the cytidine deaminase is an APOBEC1 deaminase comprising one or more mutations at amino acid positions corresponding to W90, R118, H121, H122, R126, or R132 in rat APOBEC1, or an APOBEC3G deaminase comprising one or more mutations at amino acid positions corresponding to W285, R313, D316, D317X, R320, or R326 in human APOBEC3G.

[0840] In some embodiments, the cytidine deaminase comprises a mutation at tryptophane90 of the rat APOBEC1 amino acid sequence, or a corresponding position in a homologous APOBEC protein, such as tryptophane285 of APOBEC3G. In some embodiments, the tryptophan residue at position 90 is replaced by an tyrosine or phenylalanine residue (W90Y or W90F).

[0841] In some embodiments, the cytidine deaminase comprises a mutation at Arginine118 of the rat APOBEC1 amino acid sequence, or a corresponding position in a homologous APOBEC protein. In some embodiments, the arginine residue at position 118 is replaced by an alanine residue (R118A).

[0842] In some embodiments, the cytidine deaminase comprises a mutation at Histidine121 of the rat APOBEC1 amino acid sequence, or a corresponding position in a homologous APOBEC protein. In some embodiments, the histidine residue at position 121 is replaced by an arginine residue (H121R).

[0843] In some embodiments, the cytidine deaminase comprises a mutation at Histidine122 of the rat APOBEC1 amino acid sequence, or a corresponding position in a homologous APOBEC protein. In some embodiments, the histidine residue at position 122 is replaced by an arginine residue (H122R).

[0844] In some embodiments, the cytidine deaminase comprises a mutation at Arginine126 of the rat APOBEC1 amino acid sequence, or a corresponding position in a homologous APOBEC protein, such as Arginine320 of APOBEC3G. In some embodiments, the arginine residue at position 126 is replaced by an alanine residue (R126A) or by a glutamic acid (R126E).

[0845] In some embodiments, the cytidine deaminase comprises a mutation at arginine132 of the APOBEC1 amino acid sequence, or a corresponding position in a homologous APOBEC protein. In some embodiments, the arginine residue at position 132 is replaced by a glutamic acid residue (R132E).

[0846] In some embodiments, to narrow the width of the editing window, the cytidine deaminase may comprise one or more of the mutations: W90Y, W90F, R126E and R132E, based on amino acid sequence positions of rat APOBEC1, and mutations in a homologous APOBEC protein corresponding to the above.

[0847] In some embodiments, to reduce editing efficiency, the cytidine deaminase may comprise one or more of the mutations: W90A, R118A, R132E, based on amino acid sequence positions of rat APOBEC1, and mutations in a homologous APOBEC protein corresponding to the above. In particular embodiments, it can be of interest to use a cytidine deaminase enzyme with reduced efficacy to reduce off-target effects.

[0848] In some embodiments, the cytidine deaminase is wild-type rat APOBEC1 (rAPOBEC1, or a catalytic domain thereof. In some embodiments, the cytidine deaminase comprises one or more mutations in the rAPOBEC1 sequence, such that the editing efficiency, and/or substrate editing preference of rAPOBEC1 is changed according to specific needs.

rAPOBEC 1 :
(SEQ ID NO: 72)
[sequence omitted]

[0849] In some embodiments, the cytidine deaminase is wild-type human APOBEC1 (hAPOBEC1) or a catalytic domain thereof. In some embodiments, the cytidine deaminase comprises one or more mutations in the hAPOBEC1 sequence, such that the editing efficiency, and/or substrate editing preference of hAPOBEC 1 is changed according to specific needs.

APOBEC1:
(SEQ ID NO: 173)
MTSEKGPSTGDPTLRRRIEPWEFDVFYDPRELRKEACLLYEIKWGMSRKI
WRSSGKNTTNHVEVNFIKKFTSERDFHPSMSCSITWFLSWSPCWECSQAI
REFLSRHPGVTLVIYVARLFWHMDQQNRQGLRDLVNSGVTIQIMRASEYY
HCWRNFVNYPPGDEAHWPQYPPLWMMLYALELHCIILSLPPCLKISRRWQ
NHLTFFRLHLQNCHYQTIPPHILLATGLIHPSVAWR

[0850] In some embodiments, the cytidine deaminase is wild-type human APOBEC3G (hAPOBEC3G) or a catalytic domain thereof. In some embodiments, the cytidine deaminase comprises one or more mutations in the hAPOBEC3G sequence, such that the editing efficiency, and/or substrate editing preference of hAPOBEC3G is changed according to specific needs.

hAPOBEC3G:
(SEQ ID NO: 174)
MELKYHPEMRFFHWFSKWRKLHRDQEYEVTWYISWSPCTKCTRDMATFLA
EDPKVTLTIFVARLYYFWDPDYQEALRSLCQKRDGPRATMKIMNYDEFQH
CWSKFVYSQRELFEPWNNLPKYYILLHIMLGEILRHSMDPPTFTENENNE
PWVRGRHETYLCYEVERMHNDTWVLLNQRRGELCNQAPHKHGELEGRHAE
LCFLDVIPFWKLDLDQDYRVTCFTSWSPCFSCAQEMAKFISKNKHVSLCI
FTARIYDDQGRCQEGLRTLAEAGAKISIMTYSEFKHCWDTFVDHQGCPFQ
PWDGLDEHSQDLSGRLRAILQNQEN

[0851] In some embodiments, the cytidine deaminase is wild-type Petromyzon marinus CDA1 (pmCDA1) or a catalytic domain thereof. In some embodiments, the cytidine deaminase comprises one or more mutations in the pmCDA1 sequence, such that the editing efficiency, and/or substrate editing preference of pmCDA1 is changed according to specific needs.

pmCDA1:
(SEQ ID NO: 175)
MTDAEYVRIHEKLDIYTFKKQFFNNKKSVSHRCYVLFELKRRGERRACFW
GYAVNKPQSGTERGIHAEIFSIRKVEEYLRDNPGQFTINWYSSWSPCADC
AEKILEWYNQELRGNGHTLKIWACKLYYEKNARNQIGLWNLRDNGVGLNV
MVSEHYQCCRKIFIQSSHNQLNENRWLEKTLKRAEKRRSELSIMIQVKIL
HTTKSPAV

[0852] In some embodiments, the cytidine deaminase is wild-type human AID (hAID) or a catalytic domain thereof. In some embodiments, the cytidine deaminase comprises one or more mutations in the pmCDA1 sequence, such that the editing efficiency, and/or substrate editing preference of pmCDA1 is changed according to specific needs.

hAID:
(SEQ ID NO: 176)
MDSLLMNRRKFLYQFKNVRWAKGRRETYLCYVVKRRDSATSFSLDFGYLR
NKNGCHVELLFLRYISDWDLDPGRCYRVTWFTSWSPCYDCARHVADFLRG
NPYLSLRIFTARLYFCEDRKAEPEGLRRLHRAGVQIAIMTFKDYFYCWNT
FVENHERTFKAWEGLHENSVRLSRQLRRILLPLYEVDDLRDAFRTLGLLD

[0853] In some embodiments, the cytidine deaminase is truncated version of hAID (hAID-DC) or a catalytic domain thereof. In some embodiments, the cytidine deaminase comprises one or more mutations in the hAID-DC sequence, such that the editing efficiency, and/or substrate editing preference of hAID-DC is changed according to specific needs.

hAID-DC:
(SEQ ID NO: 177)
MDSLLMNRRKFLYQFKNVRWAKGRRETYLCYVVKRRDSATSFSLDFGYLR
NKNGCHVELLFLRYISDWDLDPGRCYRVTWFTSWSPCYDCARHVADFLRG
NPNLSLRIFTARLYFCEDRKAEPEGLRRLHRAGVQIAIMTFKDYFYCWNT
FVENHERTFKAWEGLHENSVRLSRQLRRILL

[0854] Additional embodiments of the cytidine deaminase are disclosed in WO WO2017/070632, titled “Nucleobase Editor and Uses Thereof,” which is incorporated herein by reference in its entirety.

[0855] In some embodiments, the cytidine deaminase has an efficient deamination window that encloses the nucleotides susceptible to deamination editing. Accordingly, in some embodiments, the “editing window width” refers to the number of nucleotide positions at a given target site for which editing efficiency of the cytidine deaminase exceeds the half-maximal value for that target site. In some embodiments, the cytidine deaminase has an editing window width in the range of about 1 to about 6 nucleotides. In some embodiments, the editing window width of the cytidine deaminase is 1, 2, 3, 4, 5, or 6 nucleotides.

[0856] Not intended to be bound by theory, it is contemplated that in some embodiments, the length of the linker sequence affects the editing window width. In some embodiments, the editing window width increases (e.g., from about 3 to about 6 nucleotides) as the linker length extends (e.g., from about 3 to about 21 amino acids). In a non-limiting example, a 16-residue linker offers an efficient deamination window of about 5 nucleotides. In some embodiments, the length of the guide RNA affects the editing window width. In some embodiments, shortening the guide RNA leads to a narrowed efficient deamination window of the cytidine deaminase.

[0857] In some embodiments, mutations to the cytidine deaminase affect the editing window width. In some embodiments, the cytidine deaminase component of the CD-functionalized CRISPR system comprises one or more mutations that reduce the catalytic efficiency of the cytidine deaminase, such that the deaminase is prevented from deamination of multiple cytidines per DNA binding event. In some embodiments, tryptophan at residue 90 (W90) of APOBEC1 or a corresponding tryptophan residue in a homologous sequence is mutated. In some embodiments, the catalytically inactive Cas is fused to or linked to an APOBEC1 mutant that comprises a W90Y or W90F mutation. In some embodiments, tryptophan at residue 285 (W285) of APOBEC3G, or a corresponding tryptophan residue in a homologous sequence is mutated. In some embodiments, the catalytically inactive Cas is fused to or linked to an APOBEC3G mutant that comprises a W285Y or W285F mutation.

[0858] In some embodiments, the cytidine deaminase component of CD-functionalized CRISPR system comprises one or more mutations that reduce tolerance for non-optimal presentation of a cytidine to the deaminase active site. In some embodiments, the cytidine deaminase comprises one or more mutations that alter substrate binding activity of the deaminase active site. In some embodiments, the cytidine deaminase comprises one or more mutations that alter the conformation of DNA to be recognized and bound by the deaminase active site. In some embodiments, the cytidine deaminase comprises one or more mutations that alter the substrate accessibility to the deaminase active site. In some embodiments, arginine at residue 126 (R126) of APOBEC1 or a corresponding arginine residue in a homologous sequence is mutated. In some embodiments, the catalytically inactive Cas is fused to or linked to an APOBEC1 that comprises a R126A or R126E mutation. In some embodiments, tryptophan at residue 320 (R320) of APOBEC3G, or a corresponding arginine residue in a homologous sequence is mutated. In some embodiments, the catalytically inactive Cas is fused to or linked to an APOBEC3G mutant that comprises a R320A or R320E mutation. In some embodiments, arginine at residue 132 (R132) of APOBEC1 or a corresponding arginine residue in a homologous sequence is mutated. In some embodiments, the catalytically inactive Cas is fused to or linked to an APOBEC1 mutant that comprises a R132E mutation.

[0859] In some embodiments, the APOBEC1 domain of the CD-functionalized CRISPR system comprises one, two, or three mutations selected from W90Y, W90F, R126A, R126E, and R132E. In some embodiments, the APOBEC1 domain comprises double mutations of W90Y and R126E. In some embodiments, the APOBEC1 domain comprises double mutations of W90Y and R132E. In some embodiments, the APOBEC1 domain comprises double mutations of R126E and R132E. In some embodiments, the APOBEC1 domain comprises three mutations of W90Y, R126E and R132E.

[0860] In some embodiments, one or more mutations in the cytidine deaminase as disclosed herein reduce the editing window width to about 2 nucleotides. In some embodiments, one or more mutations in the cytidine deaminase as disclosed herein reduce the editing window width to about 1 nucleotide. In some embodiments, one or more mutations in the cytidine deaminase as disclosed herein reduce the editing window width while only minimally or modestly affecting the editing efficiency of the enzyme. In some embodiments, one or more mutations in the cytidine deaminase as disclosed herein reduce the editing window width without reducing the editing efficiency of the enzyme. In some embodiments, one or more mutations in the cytidine deaminase as disclosed herein enable discrimination of neighboring cytidine nucleotides, which would be otherwise edited with similar efficiency by the cytidine deaminase.

[0861] In some embodiments, the cytidine deaminase protein further comprises or is connected to one or more double-stranded RNA (dsRNA) binding motifs (dsRBMs) or domains (dsRBDs) for recognizing and binding to double-stranded nucleic acid substrates. In some embodiments, the interaction between the cytidine deaminase and the substrate is mediated by one or more additional protein factor(s), including a CRISPR/CAS protein factor. In some embodiments, the interaction between the cytidine deaminase and the substrate is further mediated by one or more nucleic acid component(s), including a guide RNA.

[0862] According to the present invention, the substrate of the cytidine deaminase is an DNA single strand bubble of a RNA duplex comprising a Cytosine of interest, made accessible to the cytidine deaminase upon binding of the guide molecule to its DNA target which then forms the CRISPR-Cas complex with the CRISPR-Cas enzyme, whereby the cytosine deaminase is fused to or is capable of binding to one or more components of the CRISPR-Cas complex, i.e. the CRISPR-Cas enzyme and/or the guide molecule. The particular features of the guide molecule and CRISPR-Cas enzyme are detailed below.

[0863] The cytidine deaminase or catalytic domain thereof may be a human, a rat, or a lamprey cytidine deaminase protein or catalytic domain thereof.

[0864] The cytidine deaminase protein or catalytic domain thereof may be an apolipoprotein B mRNA-editing complex (APOBEC) family deaminase. The cytidine deaminase protein or catalytic domain thereof may be an activation-induced deaminase (AID). The cytidine deaminase protein or catalytic domain thereof may be a cytidine deaminase 1 (CDA1).

[0865] The cytidine deaminase protein or catalytic domain thereof may be an APOBEC1 deaminase. The APOBEC1 deaminase may comprise one or more mutations corresponding to W90A, W90Y, R118A, H121R, H122R, R126A, R126E, or R132E in rat APOBEC1, or an APOBEC3G deaminase comprising one or more mutations corresponding to W285A, W285Y, R313A, D316R, D317R, R320A, R320E, or R326E in human APOBEC3G.

[0866] The system may further comprise an uracil glycosylase inhibitor (UGI). Inn some embodiments, the cytidine deaminase protein or catalytic domain thereof is delivered together with a uracil glycosylase inhibitor (UGI). The GI may be linked (e.g., covalently linked) to the cytidine deaminase protein or catalytic domain thereof and/or a catalytically inactive Cas protein.

### Base Editing Guide Molecule Design Considerations

[0867] In some embodiments, the guide sequence is an RNA sequence of between 10 to 50 nt in length, but more particularly of about 20-30 nt advantageously about 20 nt, 23-25 nt or 24 nt. In base editing embodiments, the guide sequence is selected so as to ensure that it hybridizes to the target sequence comprising the adenosine to be deaminated. This is described more in detail below. Selection can encompass further steps which increase efficacy and specificity of deamination.

[0868] In some embodiments, the guide sequence is about 20 nt to about 30 nt long and hybridizes to the target DNA strand to form an almost perfectly matched duplex, except for having a dA-C mismatch at the target adenosine site. Particularly, in some embodiments, the dA-C mismatch is located close to the center of the target sequence (and thus the center of the duplex upon hybridization of the guide sequence to the target sequence), thereby restricting the adenosine deaminase to a narrow editing window (e.g., about 4 bp wide). In some embodiments, the target sequence may comprise more than one target adenosine to be deaminated. In further embodiments the target sequence may further comprise one or more dA-C mismatch 3′ to the target adenosine site. In some embodiments, to avoid off-target editing at an unintended Adenine site in the target sequence, the guide sequence can be designed to comprise a non-pairing Guanine at a position corresponding to said unintended Adenine to introduce a dA-G mismatch, which is catalytically unfavorable for certain adenosine deaminases such as ADAR1 and ADAR2. See Wong et al., RNA 7:846-858 (2001), which is incorporated herein by reference in its entirety.

[0869] In some embodiments, a Cas guide sequence having a canonical length (e.g., about 20 nt for AacC2c1) is used to form a heteroduplex with the target DNA. In some embodiments, a Cas13b guide molecule longer than the canonical length (e.g., >20 nt for AacC2c1) is used to form a heteroduplex with the target DNA including outside of the Cas-guide RNA-target DNA complex. This can be of interest where deamination of more than one adenine within a given stretch of nucleotides is of interest. In alternative embodiments, it is of interest to maintain the limitation of the canonical guide sequence length. In some embodiments, the guide sequence is designed to introduce a dA-C mismatch outside of the canonical length of Cas guide, which may decrease steric hindrance by Cas and increase the frequency of contact between the adenosine deaminase and the dA-C mismatch.

[0870] In some base editing embodiments, the position of the mismatched nucleobase (e.g., cytidine) is calculated from where the PAM would be on a DNA target. In some embodiments, the mismatched nucleobase is positioned 12-21 nt from the PAM, or 13-21 nt from the PAM, or 14-21 nt from the PAM, or 14-20 nt from the PAM, or 15-20 nt from the PAM, or 16-20 nt from the PAM, or 14-19 nt from the PAM, or 15-19 nt from the PAM, or 16-19 nt from the PAM, or 17-19 nt from the PAM, or about 20 nt from the PAM, or about 19 nt from the PAM, or about 18 nt from the PAM, or about 17 nt from the PAM, or about 16 nt from the PAM, or about 15 nt from the PAM, or about 14 nt from the PAM. In a preferred embodiment, the mismatched nucleobase is positioned 17-19 nt or 18 nt from the PAM.

[0871] Mismatch distance is the number of bases between the 3′ end of the Cas spacer and the mismatched nucleobase (e.g., cytidine), wherein the mismatched base is included as part of the mismatch distance calculation. In some embodiment, the mismatch distance is 1-10 nt, or 1-9 nt, or 1-8 nt, or 2-8 nt, or 2-7 nt, or 2-6 nt, or 3-8 nt, or 3-7 nt, or 3-6 nt, or 3-5 nt, or about 2 nt, or about 3 nt, or about 4 nt, or about 5 nt, or about 6 nt, or about 7 nt, or about 8 nt. In a preferred embodiment, the mismatch distance is 3-5 nt or 4 nt.

[0872] In some embodiment, the editing window of a Cas-ADAR system described herein is 12-21 nt from the PAM, or 13-21 nt from the PAM, or 14-21 nt from the PAM, or 14-20 nt from the PAM, or 15-20 nt from the PAM, or 16-20 nt from the PAM, or 14-19 nt from the PAM, or 15-19 nt from the PAM, or 16-19 nt from the PAM, or 17-19 nt from the PAM, or about 20 nt from the PAM, or about 19 nt from the PAM, or about 18 nt from the PAM, or about 17 nt from the PAM, or about 16 nt from the PAM, or about 15 nt from the PAM, or about 14 nt from the PAM. In some embodiment, the editing window of the Cas-ADAR system described herein is 1-10 nt from the 3′ end of the Cas spacer, or 1-9 nt from the 3′ end of the Cas spacer, or 1-8 nt from the 3′ end of the Cas spacer, or 2-8 nt from the 3′ end of the Cas spacer, or 2-7 nt from the 3′ end of the Cas spacer, or 2-6 nt from the 3′ end of the Cas spacer, or 3-8 nt from the 3′ end of the Cas spacer, or 3-7 nt from the 3′ end of the Cas spacer, or 3-6 nt from the 3′ end of the Cas spacer, or 3-5 nt from the 3′ end of the Cas spacer, or about 2 nt from the 3′ end of the Cas spacer, or about 3 nt from the 3′ end of the Cas spacer, or about 4 nt from the 3′ end of the Cas spacer, or about 5 nt from the 3′ end of the Cas spacer, or about 6 nt from the 3′ end of the Cas spacer, or about 7 nt from the 3′ end of the Cas spacer, or about 8 nt from the 3′ end of the Cas spacer.

Methods for Determining on/Off-Target Activity and Selecting Suitable Target Sequences/Guides

[0873] In certain example embodiments, parameters such as, but not limited to, off-target candidates, PAM restrictiveness, target cleavage efficiency, or effector protein specific may be determined using sequencing-based double-strand break (DSB) detection assays. Example sequencing-based DSB detection assay sChIP-seq (Szilard et al. Nat. Struct. Mol. Biol. 18, 299-305 (2010); Iacovoni et al. EMBO J. 29, 1446-1457 (2010)), BLESS (Crosetto et al. Nat. Methods 10, 361-365 (2013); Ran et al. Nature 520, 186-191 (2015); Slaymaker et al. Science 351, 84-88 (2016)), GUIDEseq (Tsai et al. Nat. Biotech 33, 187-197 (2015)), Digenome-seq (Kim et al. Nat. Methods 12, 237-43 (2015)), IDLV-mediated DNA break capture (Wang et al. Nat. Biotechnol. 33, 179-186 (2015), HTGTS (Frock et al. Nat. Biotechnol. 33, 179-186 (2015)), End-Seq (Canela et al. Mol. Cell 63, 898-911 (2016), and DSBCapture (Lensing et al. Nat. Methods 13, 855-857 (2016). Additional methods that may be used to assess target cleavage efficiency include SITE-Seq (Cameron et al. Nature Methods, 14, 600-606 (2017), and CIRCLE-seq (Tsai et al. Nature Methods 14, 607-614 (2017)).

[0874] Methods useful for assessing Cas RNase activity include those disclosed in Zhong et al. Nature Chemical Biology Jun. 19, 2017 doi: 10.1038/NCHEMBIO.2410. Increased RNase activity and the ability to excise multiple CRISPR RNAs (crRNA) from a single RNA polymerase II-driven RNA transcript can simplify modification of multiple genomic targets and can be used to increase the efficiency of Cas-mediated editing.

### BLISS

[0875] Other suitable assays include those described in Yan et al. (“BLISS: quantitative and versatile genome-wide profiling of DNA breaks in situ”, BioRxiv, Dec. 4, 2016, doi: dx.doi.org/10.1101/091629) describe a versatile, sensitive and quantitative method for detecting DSBs applicable to low-input specimens of both cells and tissues that is scalable for high-throughput DSB mapping in multiple samples. Breaks Labeling In Situ and Sequencing (BLISS), features efficient in situ DSB labeling in fixed cells or tissue sections immobilized onto a solid surface, linear amplification of tagged DSBs via T7-mediated in vitro transcription (IVT) for greater sensitivity, and accurate DSB quantification by incorporation of unique molecular identifiers (UMIs).

### Curtain

[0876] A further method, has been developed which may also be useful in assessing certain parameters disclosed herein. The method allowing on target and off target cutting of a nuclease to be assessed in a direct and unbiased way using in vitro cutting of immobilized nucleic acid molecules. Further reference is made to International Patent Application No. PCT/US2017/028009 entitled “Unbiased Detection of Nucleic Acid Modifications” filed on Jun. 16, 2017.

[0877] This method may also be used to select a suitable guide RNA. The method allows the detection of a nucleic acid modification, by performing the following steps: i) contacting one or more nucleic acid molecules immobilized on a solid support (immobilized nucleic acid molecules) with an agent capable of inducing a nucleic acid modification; and ii) sequencing at least part of said one or more immobilized nucleic acid molecules that comprises the nucleic acid modification using a primer specifically binding to a primer binding site. This method further allows the selection of a guide RNA from a plurality of guide RNAs specific for a selected target sequence. In particular embodiments, the method comprises contacting a plurality of nucleic acid molecules immobilized on a solid support (immobilized nucleic acid molecules) with a plurality of RNA-guided nuclease complexes capable of inducing a nucleic acid break, said plurality of RNA-guided nuclease complexes comprising a plurality of different guide RNA's, thereby inducing one or more nucleic acid breaks; attaching an adapter comprising a primer binding site to said one or more immobilized nucleic acid molecules comprising a nucleic acid break; sequencing at least part of said one or more immobilized nucleic acid molecules comprising a nucleic acid break using a primer specifically binding to said primer binding site; and selecting a guide RNA based on location and/or amount of said one or more breaks.

[0878] In particular embodiments, the method comprises determining one or more locations in said one or more immobilized nucleic acid molecules comprising a break other than a location comprising said selected target sequence (off-target breaks) and selecting a guide RNA based on said one or more locations. In particular embodiments, step v comprises determining a number of sites in said one or more immobilized nucleic acid molecules comprising off-target breaks and selecting a guide RNA based on said number of sites. In a further embodiment, step iv comprises both determining the location of off-targets breaks and the number of locations of off-target breaks.

### Safety

[0879] 1. Select Protein with Shortest Half-Life

### a) Inherent Half-Life of the Effector Protein

[0880] The extended presence of an effector protein after having performed its function at the target site is a potential safety concern, both for off-target effects and direct toxicity of the effector protein. It has been reported that upon direct delivery to the cell by LNP, CRISPR effector proteins degrade rapidly within the cell (Kim et al. Genome Res. 2014 June; 24(6): 1012-1019). Where the effector protein is to be expressed from a plasmid, strategies to actively reduce the half-life of the protein may be of interest.

### b) Use of Destabilized Domains

[0881] In certain embodiments, the methods provided herein involve the use of a Cas effector protein which is associated with or fused to a destabilization domain (DD). The technology relating to the use of destabilizing domains is described in detail in WO2016/106244, which is incorporated by reference herein.

[0882] Destabilizing domains (DD) are domains which can confer instability to a wide range of proteins; see, e.g., Miyazaki, J Am Chem Soc. Mar. 7, 2012; 134(9): 3942-3945, and Chung H Nature Chemical Biology Vol. 11 Sep. 2015 pgs 713-720, incorporated herein by reference. DD can be associated with, e.g., fused to, advantageously with a linker, to a CRISPR enzyme, whereby the DD can be stabilized in the presence of a ligand and when there is the absence thereof the DD can become destabilized, whereby the CRISPR enzyme is entirely destabilized, or the DD can be stabilized in the absence of a ligand and when the ligand is present the DD can become destabilized; the DD allows the Cas effector to be regulated or controlled, thereby providing means for regulation or control of the system. For instance, when a protein of interest is expressed as a fusion with the DD tag, it is destabilized and rapidly degraded in the cell, e.g., by proteasomes. Thus, absence of stabilizing ligand leads to a DD-associated Cas being degraded. Peak activity of the Cas effector is relevant to reduce off-target effects and for the general safety of the system. Advantages of the DD system include that it can be dosable, orthogonal (e.g., a ligand only affects its cognate DD so two or more systems can operate independently), transportable (e.g., may work in different cell types or cell lines) and allows for temporal control.

[0883] Suitable DD—stabilizing ligand pairs are known in the art and also described in WO2016/106244. The size of Destabilization Domain varies but is typically approx.—approx. 100-300 amino acids in size. Suitable examples include ER50 and/or DHFR50. A corresponding stabilizing ligand for ER50 is, for example, 4HT or CMP8. In some embodiments, one or two DDs may be fused to the N-terminal end of the CRISPR enzyme with one or two DDs fused to the C-terminal of the CRISPR enzyme. While the DD can be provided directly at N and/or C terminal(s) of the Cas effector protein, they can also be fused via a linker, such as a GlySer linker, or an NLS and/or NES. A commercially available DD system is the CloneTech, ProteoTuner™ system; the stabilizing ligand is Shield1. In some embodiments, the stabilizing ligand is a ‘small molecule’, preferably it is cell-permeable and has a high affinity for its corresponding DD.

### 2. Select Least Immunogenic RNP

[0884] When administering an agent to a mammal, there is always the risk of an immune response to the agent and/or its delivery vehicle. Circumventing the immune response is a major challenge for most delivery vehicles. Viral vectors, which express immunogenic epitopes within the organism typically induce an immune response. Nanoparticle and lipid-based vectors to some extent address this problem. Yin et al. demonstrate a therapeutic approach combining viral delivery of the guide RNA with lipid nanoparticle-mediated delivery of the CRISPR effector protein (Nature Biotechnology 34:328-33(2016)). Ziris et al. describes cationin-lipid mediated delivery of Cas9:guideRNA nuclease complexes to cells. The CRISPR effector proteins, which are of bacterial origin, also inherently carry the risk of eliciting an immune response. This may be addressed by humanizing the Cas effector protein.

### 3. Introduce Modifications in Guide RNA to Minimize Immunogenicity

[0885] Chemical modifications of RNAs have been used to avoid reactions of the innate immune system. Judge et al. (2006) demonstrated that immune stimulation by synthetic siRNA can be completely abrogated by selective incorporation of 2′-O-methyl (2′OMe) uridine or guanosine nucleosides into one strand of the siRNA duplex (Mol. Ther., 13 (2006), pp. 494-505). Cekaite et al. (J. Mol. Biol., 365 (2007), pp. 90-108) observed that replacement of only uridine bases of siRNA with either 2′-fluoro or 2′-O-methyl modified counterparts abrogated upregulation of genes involved in the regulation of the immune response. Similarly Hendel et al. tested sgRNAs with both backbone and sugar modifications that confer nuclease stability and can reduce immunostimulatory effects (Hendel et al., Nat. Biotechnol., 33 (2015), pp. 985-989).

[0886] Accordingly, in particular embodiments, the methods comprise modifying the guide RNA so as to minimize immunogenicity using one or more of these methods.

### Identify Optimal Dosage to Minimize Toxicity and Maximize Specificity

[0887] It is generally accepted that the dosage of CRISPR components will be relevant to toxicity and specificity of the system (Pattanayak et al. Nat Biotechnol. 2013 September; 31(9): 839-843). Hsu et al. (Nat Biotechnol. 2013 September; 31(9): 827-832) demonstrated that the dosage of SpCas9 and sgRNA can be titrated to address these issues. In certain example embodiments, toxicity is minimized by saturating complex with guide by either pre-forming complex, putting guide under control of a strong promoter, or via timing of delivery to ensure saturating conditions available during expression of the effector protein.

### Identifying Appropriate Delivery Vector

[0888] In some embodiments, the components of the CRISPR system may be delivered in various form, such as combinations of DNA/RNA or RNA/RNA or protein/RNA. For example, the Cas may be delivered as a DNA-coding polynucleotide or an RNA—coding polynucleotide or as a protein. The guide may be delivered as a DNA-coding polynucleotide or an RNA. All possible combinations are envisioned, including mixed forms of delivery.

[0889] In some aspects, the invention provides methods comprising delivering one or more polynucleotides, such as or one or more vectors as described herein, one or more transcripts thereof, and/or one or proteins transcribed therefrom, to a host cell.

### Delivery

[0890] Conventional viral and non-viral based gene transfer methods can be used to introduce nucleic acids in mammalian cells or target tissues. Such methods can be used to administer nucleic acids encoding components of a nucleic acid-targeting system to cells in culture, or in a host organism. Non-viral vector delivery systems include DNA plasmids, RNA (e.g. a transcript of a vector described herein), naked nucleic acid, and nucleic acid complexed with a delivery vehicle, such as a liposome. Viral vector delivery systems include DNA and RNA viruses, which have either episomal or integrated genomes after delivery to the cell. For a review of gene therapy procedures, see Anderson, Science 256:808-813 (1992); Nabel & Felgner, TIBTECH 11:211-217 (1993); Mitani & Caskey, TIBTECH 11:162-166 (1993); Dillon, TIBTECH 11:167-175 (1993); Miller, Nature 357:455-460 (1992); Van Brunt, Biotechnology 6(10):1149-1154 (1988); Vigne, Restorative Neurology and Neuroscience 8:35-36 (1995); Kremer & Perricaudet, British Medical Bulletin 51(1):31-44 (1995); Haddada et al., in Current Topics in Microbiology and Immunology, Doerfler and Bohm (eds) (1995); and Yu et al., Gene Therapy 1:13-26 (1994).

### Plasmids and Vectors

[0891] Methods of non-viral delivery of nucleic acids include lipofection, nucleofection, microinjection, biolistics, virosomes, liposomes, immunoliposomes, polycation or lipid:nucleic acid conjugates, naked DNA, artificial virions, and agent-enhanced uptake of DNA. Lipofection is described in e.g., U.S. Pat. Nos. 5,049,386, 4,946,787; and 4,897,355) and lipofection reagents are sold commercially (e.g., Transfectam™ and Lipofectin™). Cationic and neutral lipids that are suitable for efficient receptor-recognition lipofection of polynucleotides include those of Felgner, WO 91/17424; WO 91/16024. Delivery can be to cells (e.g. in vitro or ex vivo administration) or target tissues (e.g. in vivo administration).

[0892] Plasmid delivery involves the cloning of a guide RNA into a CRISPR effector protein expressing plasmid and transfecting the DNA in cell culture. Plasmid backbones are available commercially and no specific equipment is required. They have the advantage of being modular, capable of carrying different sizes of CRISPR effector coding sequences (including those encoding larger sized proteins) as well as selection markers. Both an advantage of plasmids is that they can ensure transient, but sustained expression. However, delivery of plasmids is not straightforward such that in vivo efficiency is often low. The sustained expression can also be disadvantageous in that it can increase off-target editing. In addition excess build-up of the CRISPR effector protein can be toxic to the cells. Finally, plasmids always hold the risk of random integration of the dsDNA in the host genome, more particularly in view of the double-stranded breaks being generated (on and off-target).

[0893] The preparation of lipid:nucleic acid complexes, including targeted liposomes such as immunolipid complexes, is well known to one of skill in the art (see, e.g., Crystal, Science 270:404-410 (1995); Blaese et al., Cancer Gene Ther. 2:291-297 (1995); Behr et al., Bioconjugate Chem. 5:382-389 (1994); Remy et al., Bioconjugate Chem. 5:647-654 (1994); Gao et al., Gene Therapy 2:710-722 (1995); Ahmad et al., Cancer Res. 52:4817-4820 (1992); U.S. Pat. Nos. 4,186,183, 4,217,344, 4,235,871, 4,261,975, 4,485,054, 4,501,728, 4,774,085, 4,837,028, and 4,946,787). This is discussed more in detail below.

[0894] The advantages and disadvantages of Plasmid delivery are described by Plasmid delivery involves the cloning of a guide RNA into a CRISPR effector protein expressing plasmid and transfecting the DNA in cell culture. Plasmid backbones are available commercially and no specific equipment is required. They have the advantage of being modular, capable of carrying different sizes of CRISPR effector coding sequences (including those encoding larger sized proteins) as well as selection markers. Both an advantage of plasmids is that they can ensure transient, but sustained expression. However, delivery of plasmids is not straightforward such that in vivo efficiency is often low. The sustained expression can also be disadvantageous in that it can increase off-target editing. In addition excess build-up of the CRISPR effector protein can be toxic to the cells. Finally, plasmids always hold the risk of random integration of the dsDNA in the host genome, more particularly in view of the double-stranded breaks being generated (on and off-target). The preparation of lipid:nucleic acid complexes, including targeted liposomes such as immunolipid complexes, is well known to one of skill in the art (see, e.g., Crystal, Science 270:404-410 (1995); Blaese et al., Cancer Gene Ther. 2:291-297 (1995); Behr et al., Bioconjugate Chem. 5:382-389 (1994); Remy et al., Bioconjugate Chem. 5:647-654 (1994); Gao et al., Gene Therapy 2:710-722 (1995); Ahmad et al., Cancer Res. 52:4817-4820 (1992); U.S. Pat. Nos. 4,186,183, 4,217,344, 4,235,871, 4,261,975, 4,485,054, 4,501,728, 4,774,085, 4,837,028, and 4,946,787). This is discussed more in detail below.

[0895] The use of RNA or DNA viral based systems for the delivery of nucleic acids takes advantage of highly evolved processes for targeting a virus to specific cells in the body and trafficking the viral payload to the nucleus. Viral vectors can be administered directly to patients (in vivo) or they can be used to treat cells in vitro, and the modified cells may optionally be administered to patients (ex vivo). Conventional viral based systems could include retroviral, lentivirus, adenoviral, adeno-associated and herpes simplex virus vectors for gene transfer. Integration in the host genome is possible with the retrovirus, lentivirus, and adeno-associated virus gene transfer methods, often resulting in long term expression of the inserted transgene. Additionally, high transduction efficiencies have been observed in many different cell types and target tissues.

[0896] The tropism of a retrovirus can be altered by incorporating foreign envelope proteins, expanding the potential target population of target cells. Lentiviral vectors are retroviral vectors that are able to transduce or infect non-dividing cells and typically produce high viral titers. Selection of a retroviral gene transfer system would therefore depend on the target tissue. Retroviral vectors are comprised of cis-acting long terminal repeats with packaging capacity for up to 6-10 kb of foreign sequence. The minimum cis-acting LTRs are sufficient for replication and packaging of the vectors, which are then used to integrate the therapeutic gene into the target cell to provide permanent transgene expression. Widely used retroviral vectors include those based upon murine leukemia virus (MuLV), gibbon ape leukemia virus (GaLV), Simian Immuno deficiency virus (SIV), human immuno deficiency virus (HIV), and combinations thereof (see, e.g., Buchscher et al., J. Virol. 66:2731-2739 (1992); Johann et al., J. Virol. 66:1635-1640 (1992); Sommnerfelt et al., Virol. 176:58-59 (1990); Wilson et al., J. Virol. 63:2374-2378 (1989); Miller et al., J. Virol. 65:2220-2224 (1991); PCT/US94/05700).

[0897] In applications where transient expression is preferred, adenoviral based systems may be used. Adenoviral based vectors are capable of very high transduction efficiency in many cell types and do not require cell division. With such vectors, high titer and levels of expression have been obtained. This vector can be produced in large quantities in a relatively simple system. Adeno-associated virus (“AAV”) vectors may also be used to transduce cells with target nucleic acids, e.g., in the in vitro production of nucleic acids and peptides, and for in vivo and ex vivo gene therapy procedures (see, e.g., West et al., Virology 160:38-47 (1987); U.S. Pat. No. 4,797,368; WO 93/24641; Kotin, Human Gene Therapy 5:793-801 (1994); Muzyczka, J. Clin. Invest. 94:1351 (1994). Construction of recombinant AAV vectors are described in a number of publications, including U.S. Pat. No. 5,173,414; Tratschin et al., Mol. Cell. Biol. 5:3251-3260 (1985); Tratschin, et al., Mol. Cell. Biol. 4:2072-2081 (1984); Hermonat & Muzyczka, PNAS 81:6466-6470 (1984); and Samulski et al., J. Virol. 63:03822-3828 (1989).

[0898] The invention provides AAV that contains or consists essentially of an exogenous nucleic acid molecule encoding a CRISPR system, e.g., a plurality of cassettes comprising or consisting a first cassette comprising or consisting essentially of a promoter, a nucleic acid molecule encoding a CRISPR-associated (Cas) protein (putative nuclease or helicase proteins), e.g., Cas9 and a terminator, and a two, or more, advantageously up to the packaging size limit of the vector, e.g., in total (including the first cassette) five, cassettes comprising or consisting essentially of a promoter, nucleic acid molecule encoding guide RNA (gRNA) and a terminator (e.g., each cassette schematically represented as Promoter-gRNA1-terminator, Promoter-gRNA2-terminator . . . Promoter-gRNA(N)-terminator (where N is a number that can be inserted that is at an upper limit of the packaging size limit of the vector), or two or more individual rAAVs, each containing one or more than one cassette of a CRISPR system, e.g., a first rAAV containing the first cassette comprising or consisting essentially of a promoter, a nucleic acid molecule encoding Cas, e.g., Cas9 and a terminator, and a second rAAV containing a plurality, four, cassettes comprising or consisting essentially of a promoter, nucleic acid molecule encoding guide RNA (gRNA) and a terminator (e.g., each cassette schematically represented as Promoter-gRNA1-terminator, Promoter-gRNA2-terminator . . . Promoter-gRNA(N)-terminator (where N is a number that can be inserted that is at an upper limit of the packaging size limit of the vector). As rAAV is a DNA virus, the nucleic acid molecules in the herein discussion concerning AAV or rAAV are advantageously DNA. The promoter is in some embodiments advantageously human Synapsin I promoter (hSyn). In another embodiment, multiple gRNA expression cassettes along with the Cas9 expression cassette can be delivered in a high-capacity adenoviral vector (HCAdV), from which all AAV coding genes have been removed. See e.g, Schiwon et al., “One-Vector System for Multiplexed CRISPR/Cas9 against Hepatitis B Virus cccDNA Utilizing High-Capacity Adenoviral Vectors” Mol Ther Nucleic Acids. 2018 Sep. 7; 12: 242-253; and Ehrke-Schulz et al., “CRISPR/Cas9 delivery with one single adenoviral vector devoid of all viral genes” Sci Rep. 2017; 7: 17113. Additional methods for the delivery of nucleic acids to cells are known to those skilled in the art. See, for example, US20030087817, incorporated herein by reference.

[0899] Also contemplated is delivery by dual vector systems. In one embodiment, expression cassettes of Cas9 and gRNA can be delivered via a dual vector system. Such systems can include, for example, a first AAV vector encoding a gRNA and an N-terminal Cas9 and a second AAV vector containing a C-terminal Cas9. See, e.g. Moreno et al., “In Situ Gene Therapy via AAV-CRISPR-Cas9-Mediated Targeted Gene Regulation” Mol Ther. 2018 Jul. 5; 26(7):1818-1827. In another embodiment, Cas9 protein can be separated into two parts that are expressed individually and reunited in the cell by various means, including use of 1) the gRNA as a scaffold for Cas9 assembly; 2) the rapamycin-controlled FKBP/FRB system; 3) the light-regulated Magnet system; or 4) inteins. See, e.g. Schmelas et al., “Split Cas9, Not Hairs-Advancing the Therapeutic Index of CRISPR Technology” Biotechnol J. 2018 September; 13(9):e1700432. doi: 10.1002/biot.201700432. Epub 2018 Feb. 2.

[0900] In some embodiments, an AAV vector can include additional sequence information encoding sequences that facilitate transduction or that assist in evasion of the host immune system. In one embodiment, CRISPR-Cas9 can be delivered to astrocytes using an AAV vector that includes a synthetic surface peptide for transduction of astrocytes. See, e.g. Kunze et al., “Synthetic AAV/CRISPR vectors for blocking HIV-1 expression in persistently infected astrocytes” Glia. 2018 February; 66(2):413-427. In another embodiment, CRISPR-Cas9 can be delivered in a capsid engineered AAV, for example an AAV that has been engineered to include “chemical handles” on the AAV surface and be complexed with lipids to produce a “cloaked AAV” that is resistant to endogenous neutralizing antibodies in the host. See, e.g. Katrekar et al., “Oligonucleotide conjugated multi-functional adeno-associated viruses” Sci Rep. 2018; 8: 3589.

[0901] In another embodiment, Cocal vesiculovirus envelope pseudotyped retroviral vector particles are contemplated (see, e.g., US Patent Publication No. 20120164118 assigned to the Fred Hutchinson Cancer Research Center). Cocal virus is in the Vesiculovirus genus, and is a causative agent of vesicular stomatitis in mammals. Cocal virus was originally isolated from mites in Trinidad (Jonkers et al., Am. J. Vet. Res. 25:236-242 (1964)), and infections have been identified in Trinidad, Brazil, and Argentina from insects, cattle, and horses. Many of the vesiculoviruses that infect mammals have been isolated from naturally infected arthropods, suggesting that they are vector-borne. Antibodies to vesiculoviruses are common among people living in rural areas where the viruses are endemic and laboratory-acquired; infections in humans usually result in influenza-like symptoms. The Cocal virus envelope glycoprotein shares 71.5% identity at the amino acid level with VSV-G Indiana, and phylogenetic comparison of the envelope gene of vesiculoviruses shows that Cocal virus is serologically distinct from, but most closely related to, VSV-G Indiana strains among the vesiculoviruses. Jonkers et al., Am. J. Vet. Res. 25:236-242 (1964) and Travassos da Rosa et al., Am. J. Tropical Med. & Hygiene 33:999-1006 (1984). The Cocal vesiculovirus envelope pseudotyped retroviral vector particles may include for example, lentiviral, alpharetroviral, betaretroviral, gammaretroviral, deltaretroviral, and epsilonretroviral vector particles that may comprise retroviral Gag, Pol, and/or one or more accessory protein(s) and a Cocal vesiculovirus envelope protein. Within certain aspects of these embodiments, the Gag, Pol, and accessory proteins are lentiviral and/or gammaretroviral.

[0902] In some embodiments, a host cell is transiently or non-transiently transfected with one or more vectors described herein. In some embodiments, a cell is transfected as it naturally occurs in a subject optionally to be reintroduced therein. In some embodiments, a cell that is transfected is taken from a subject. In some embodiments, the cell is derived from cells taken from a subject, such as a cell line. A wide variety of cell lines for tissue culture are known in the art. Examples of cell lines include, but are not limited to, C8161, CCRF-CEM, MOLT, mIMCD-3, NHDF, HeLa-S3, Huh1, Huh4, Huh7, HUVEC, HASMC, HEKn, HEKa, MiaPaCell, Pancl, PC-3, TF1, CTLL-2, C1R, Rat6, CV1, RPTE, A10, T24, J82, A375, ARH-77, Calu1, SW480, SW620, SKOV3, SK-UT, CaCo2, P388D1, SEM-K2, WEHI-231, HB56, TIB55, Jurkat, J45.01, LRMB, Bcl-1, BC-3, IC21, DLD2, Raw264.7, NRK, NRK-52E, MRC5, MEF, Hep G2, HeLa B, HeLa T4, COS, COS-1, COS-6, COS-M6A, BS-C-1 monkey kidney epithelial, BALB/3T3 mouse embryo fibroblast, 3T3 Swiss, 3T3-L1, 132-d5 human fetal fibroblasts; 10.1 mouse fibroblasts, 293-T, 3T3, 721, 9L, A2780, A2780ADR, A2780cis, A172, A20, A253, A431, A-549, ALC, B16, B35, BCP-1 cells, BEAS-2B, bEnd.3, BHK-21, BR 293, BxPC3, C3H-10T1/2, C6/36, Cal-27, CHO, CHO-7, CHO-IR, CHO-K1, CHO-K2, CHO-T, CHO Dhfr−/−, COR-L23, COR-L23/CPR, COR-L23/5010, COR-L23/R23, COS-7, COV-434, CML T1, CMT, CT26, D17, DH82, DU145, DuCaP, EL4, EM2, EM3, EMT6/AR1, EMT6/AR10.0, FM3, H1299, H69, HB54, HB55, HCA2, HEK-293, HeLa, Hepa1c1c7, HL-60, HMEC, HT-29, Jurkat, JY cells, K562 cells, Ku812, KCL22, KG1, KYO1, LNCap, Ma-Mel 1-48, MC-38, MCF-7, MCF-10A, MDA-MB-231, MDA-MB-468, MDA-MB-435, MDCK II, MDCK II, MOR/0.2R, MONO-MAC 6, MTD-1A, MyEnd, NCI-H69/CPR, NCI-H69/LX10, NCI-H69/LX20, NCI-H69/LX4, NIH-3T3, NALM-1, NW-145, OPCN/OPCT cell lines, Peer, PNT-1A/PNT 2, RenCa, RIN-5F, RMA/RMAS, Saos-2 cells, Sf-9, SkBr3, T2, T-47D, T84, THP1 cell line, U373, U87, U937, VCaP, Vero cells, WM39, WT-49, X63, YAC-1, YAR, and transgenic varieties thereof. Cell lines are available from a variety of sources known to those with skill in the art (see, e.g., the American Type Culture Collection (ATCC) (Manassas, Va.)). In some embodiments, a cell transfected with one or more vectors described herein is used to establish a new cell line comprising one or more vector-derived sequences. In some embodiments, a cell transiently transfected with the components of a CRISPR system as described herein (such as by transient transfection of one or more vectors, or transfection with RNA), and modified through the activity of a CRISPR complex, is used to establish a new cell line comprising cells containing the modification but lacking any other exogenous sequence. In some embodiments, cells transiently or non-transiently transfected with one or more vectors described herein, or cell lines derived from such cells are used in assessing one or more test compounds.

### Vectors

[0903] In general, and throughout this specification, the term “vector” refers to a nucleic acid molecule capable of transporting another nucleic acid to which it has been linked. It is a replicon, such as a plasmid, phage, or cosmid, into which another DNA segment may be inserted so as to bring about the replication of the inserted segment. Generally, a vector is capable of replication when associated with the proper control elements.

[0904] Vectors include, but are not limited to, nucleic acid molecules that are single-stranded, double-stranded, or partially double-stranded; nucleic acid molecules that comprise one or more free ends, no free ends (e.g., circular); nucleic acid molecules that comprise DNA, RNA, or both; and other varieties of polynucleotides known in the art. One type of vector is a “plasmid,” which refers to a circular double stranded DNA loop into which additional DNA segments can be inserted, such as by standard molecular cloning techniques. Another type of vector is a viral vector, wherein virally-derived DNA or RNA sequences are present in the vector for packaging into a virus (e.g., retroviruses, replication defective retroviruses, adenoviruses, replication defective adenoviruses, and adeno-associated viruses). Viral vectors also include polynucleotides carried by a virus for transfection into a host cell. Certain vectors are capable of autonomous replication in a host cell into which they are introduced (e.g., bacterial vectors having a bacterial origin of replication and episomal mammalian vectors). Other vectors (e.g., non-episomal mammalian vectors) are integrated into the genome of a host cell upon introduction into the host cell, and thereby are replicated along with the host genome. Moreover, certain vectors are capable of directing the expression of genes to which they are operatively-linked. Such vectors are referred to herein as “expression vectors.” Vectors for and that result in expression in a eukaryotic cell can be referred to herein as “eukaryotic expression vectors.” Common expression vectors of utility in recombinant DNA techniques are often in the form of plasmids.

[0905] Recombinant expression vectors can comprise a nucleic acid of the invention in a form suitable for expression of the nucleic acid in a host cell, which means that the recombinant expression vectors include one or more regulatory elements, which may be selected on the basis of the host cells to be used for expression, that is operatively-linked to the nucleic acid sequence to be expressed. Within a recombinant expression vector, “operably linked” is intended to mean that the nucleotide sequence of interest is linked to the regulatory element(s) in a manner that allows for expression of the nucleotide sequence (e.g., in an in vitro transcription/translation system or in a host cell when the vector is introduced into the host cell). Advantageous vectors include lentiviruses and adeno-associated viruses, and types of such vectors can also be selected for targeting particular types of cells.

[0906] With regards to recombination and cloning methods, mention is made of U.S. patent application Ser. No. 10/815,730, published Sep. 2, 2004 as US 2004-0171156 A1, the contents of which are herein incorporated by reference in their entirety.

[0907] Advantageous vectors include lentiviruses and adeno-associated viruses, and types of such vectors can also be selected for targeting particular types of cells.

[0908] In some embodiments, one or more vectors driving expression of one or more elements of a nucleic acid-targeting system are introduced into a host cell such that expression of the elements of the nucleic acid-targeting system direct formation of a nucleic acid-targeting complex at one or more target sites. For example, a nucleic acid-targeting effector enzyme and a nucleic acid-targeting guide RNA could each be operably linked to separate regulatory elements on separate vectors. RNA(s) of the nucleic acid-targeting system can be delivered to a transgenic nucleic acid-targeting effector protein animal or mammal, e.g., an animal or mammal that constitutively or inducibly or conditionally expresses nucleic acid-targeting effector protein; or an animal or mammal that is otherwise expressing nucleic acid-targeting effector proteins or has cells containing nucleic acid-targeting effector proteins, such as by way of prior administration thereto of a vector or vectors that code for and express in vivo nucleic acid-targeting effector proteins. Alternatively, two or more of the elements expressed from the same or different regulatory elements, may be combined in a single vector, with one or more additional vectors providing any components of the nucleic acid-targeting system not included in the first vector. nucleic acid-targeting system elements that are combined in a single vector may be arranged in any suitable orientation, such as one element located 5′ with respect to (“upstream” of) or 3′ with respect to (“downstream” of) a second element. The coding sequence of one element may be located on the same or opposite strand of the coding sequence of a second element, and oriented in the same or opposite direction. In some embodiments, a single promoter drives expression of a transcript encoding a nucleic acid-targeting effector protein and the nucleic acid-targeting guide RNA, embedded within one or more intron sequences (e.g., each in a different intron, two or more in at least one intron, or all in a single intron). In some embodiments, the nucleic acid-targeting effector protein and the nucleic acid-targeting guide RNA may be operably linked to and expressed from the same promoter. Delivery vehicles, vectors, particles, nanoparticles, formulations and components thereof for expression of one or more elements of a nucleic acid-targeting system are as used in the foregoing documents, such as WO 2014/093622 (PCT/US2013/074667). In some embodiments, a vector comprises one or more insertion sites, such as a restriction endonuclease recognition sequence (also referred to as a “cloning site”). In some embodiments, one or more insertion sites (e.g., about or more than about 1, 2, 3, 4, 5, 6, 7, 8, 9, 10, or more insertion sites) are located upstream and/or downstream of one or more sequence elements of one or more vectors. When multiple different guide sequences are used, a single expression construct may be used to target nucleic acid-targeting activity to multiple different, corresponding target sequences within a cell. For example, a single vector may comprise about or more than about 1, 2, 3, 4, 5, 6, 7, 8, 9, 10, 15, 20, or more guide sequences. In some embodiments, about or more than about 1, 2, 3, 4, 5, 6, 7, 8, 9, 10, or more such guide-sequence-containing vectors may be provided, and optionally delivered to a cell. In some embodiments, a vector comprises a regulatory element operably linked to an enzyme-coding sequence encoding a nucleic acid-targeting effector protein. Nucleic acid-targeting effector protein or nucleic acid-targeting guide RNA or RNA(s) can be delivered separately; and advantageously at least one of these is delivered via a particle complex. nucleic acid-targeting effector protein mRNA can be delivered prior to the nucleic acid-targeting guide RNA to give time for nucleic acid-targeting effector protein to be expressed. Nucleic acid-targeting effector protein mRNA might be administered 1-12 hours (preferably around 2-6 hours) prior to the administration of nucleic acid-targeting guide RNA. Alternatively, nucleic acid-targeting effector protein mRNA and nucleic acid-targeting guide RNA can be administered together. Advantageously, a second booster dose of guide RNA can be administered 1-12 hours (preferably around 2-6 hours) after the initial administration of nucleic acid-targeting effector protein mRNA+guide RNA. Additional administrations of nucleic acid-targeting effector protein mRNA and/or guide RNA might be useful to achieve the most efficient levels of genome modification.

[0909] In some embodiments, a vector encodes a Cas effector protein comprising one or more nuclear localization sequences (NLSs), such as about or more than about 1, 2, 3, 4, 5, 6, 7, 8, 9, 10, or more NLSs. More particularly, vector comprises one or more NLSs not naturally present in the Cas effector protein. Most particularly, the NLS is present in the vector 5′ and/or 3′ of the Cas effector protein sequence In some embodiments, the RNA-targeting effector protein comprises about or more than about 1, 2, 3, 4, 5, 6, 7, 8, 9, 10, or more NLSs at or near the amino-terminus, about or more than about 1, 2, 3, 4, 5, 6, 7, 8, 9, 10, or more NLSs at or near the carboxy-terminus, or a combination of these (e.g., zero or at least one or more NLS at the amino-terminus and zero or at one or more NLS at the carboxy terminus). When more than one NLS is present, each may be selected independently of the others, such that a single NLS may be present in more than one copy and/or in combination with one or more other NLSs present in one or more copies. In some embodiments, an NLS is considered near the N- or C-terminus when the nearest amino acid of the NLS is within about 1, 2, 3, 4, 5, 10, 15, 20, 25, 30, 40, 50, or more amino acids along the polypeptide chain from the N- or C-terminus. Non-limiting examples of NLSs include an NLS sequence derived from: the NLS of the SV40 virus large T-antigen, having the amino acid sequence PKKKRKV (SEQ ID NO: 178); the NLS from nucleoplasmin (e.g., the nucleoplasmin bipartite NLS with the sequence KRPAATKKAGQAKKKK (SEQ ID NO: 179)); the c-myc NLS having the amino acid sequence PAAKRVKLD (SEQ ID NO: 180) or RQRRNELKRSP (SEQ ID NO: 181); the hRNPA1 M9 NLS having the sequence NQSSNFGPMKGGNFGGRSSGPYGGGGQYFAKPRNQGGY (SEQ ID NO: 182); the sequence RMRIZFKNKGKDTAELRRRRVEVSVELRKAKKDEQILKRRNV (SEQ ID NO: 183) of the IBB domain from importin-alpha; the sequences VSRKRPRP (SEQ ID NO: 184) and PPKKARED (SEQ ID NO: 185) of the myoma T protein; the sequence PQPKKKPL (SEQ ID NO: 186) of human p53; the sequence SALIKKKKKMAP (SEQ ID NO: 187) of mouse c-abl IV; the sequences DRLRR (SEQ ID NO: 188) and PKQKKRK (SEQ ID NO: 189) of the influenza virus NS1; the sequence RKLKKKIKKL (SEQ ID NO: 190) of the Hepatitis virus delta antigen; the sequence REKKKFLKRR (SEQ ID NO: 191) of the mouse Mx1 protein; the sequence KRKGDEVDGVDEVAKKKSKK (SEQ ID NO: 192) of the human poly(ADP-ribose) polymerase; and the sequence RKCLQAGMNLEARKTKK (SEQ ID NO: 193) of the steroid hormone receptors (human) glucocorticoid. In general, the one or more NLSs are of sufficient strength to drive accumulation of the DNA/RNA-targeting Cas protein in a detectable amount in the nucleus of a eukaryotic cell. In general, strength of nuclear localization activity may derive from the number of NLSs in the nucleic acid-targeting effector protein, the particular NLS(s) used, or a combination of these factors. Detection of accumulation in the nucleus may be performed by any suitable technique. For example, a detectable marker may be fused to the nucleic acid-targeting protein, such that location within a cell may be visualized, such as in combination with a means for detecting the location of the nucleus (e.g., a stain specific for the nucleus such as DAPI). Cell nuclei may also be isolated from cells, the contents of which may then be analyzed by any suitable process for detecting protein, such as immunohistochemistry, Western blot, or enzyme activity assay. Accumulation in the nucleus may also be determined indirectly, such as by an assay for the effect of nucleic acid-targeting complex formation (e.g., assay for DNA or RNA cleavage or mutation at the target sequence, or assay for altered gene expression activity affected by DNA or RNA-targeting complex formation and/or DNA or RNA-targeting Cas protein activity), as compared to a control not exposed to the nucleic acid-targeting Cas protein or nucleic acid-targeting complex, or exposed to a nucleic acid-targeting Cas protein lacking the one or more NLSs. In preferred embodiments of the herein described Cas effector protein complexes and systems the codon optimized Cas effector proteins comprise an NLS attached to the C-terminal of the protein. In certain embodiments, other localization tags may be fused to the Cas protein, such as without limitation for localizing the Cas to particular sites in a cell, such as organelles, such mitochondria, plastids, chloroplast, vesicles, Golgi, (nuclear or cellular) membranes, ribosomes, nucleolus, ER, cytoskeleton, vacuoles, centrosome, nucleosome, granules, centrioles, etc.

[0910] The invention also provides a non-naturally occurring or engineered composition, or one or more polynucleotides encoding components of said composition, or vector systems comprising one or more polynucleotides encoding components of said composition for use in a therapeutic method of treatment. The therapeutic method of treatment may comprise gene or genome editing, or gene therapy.

[0911] The nucleic acids-targeting systems, the vector systems, the vectors and the compositions described herein may be used in various nucleic acids-targeting applications, altering or modifying synthesis of a gene product, such as a protein, nucleic acids cleavage, nucleic acids editing, nucleic acids splicing; trafficking of target nucleic acids, tracing of target nucleic acids, isolation of target nucleic acids, visualization of target nucleic acids, etc.

[0912] In general, and throughout this specification, the term “vector” refers to a nucleic acid molecule capable of transporting another nucleic acid to which it has been linked. Vectors include, but are not limited to, nucleic acid molecules that are single-stranded, double-stranded, or partially double-stranded; nucleic acid molecules that comprise one or more free ends, no free ends (e.g., circular); nucleic acid molecules that comprise DNA, RNA, or both; and other varieties of polynucleotides known in the art. One type of vector is a “plasmid,” which refers to a circular double stranded DNA loop into which additional DNA segments can be inserted, such as by standard molecular cloning techniques. Another type of vector is a viral vector, wherein virally-derived DNA or RNA sequences are present in the vector for packaging into a virus (e.g., retroviruses, replication defective retroviruses, adenoviruses, replication defective adenoviruses, and adeno-associated viruses). Viral vectors also include polynucleotides carried by a virus for transfection into a host cell. Certain vectors are capable of autonomous replication in a host cell into which they are introduced (e.g., bacterial vectors having a bacterial origin of replication and episomal mammalian vectors). Other vectors (e.g., non-episomal mammalian vectors) are integrated into the genome of a host cell upon introduction into the host cell, and thereby are replicated along with the host genome. Moreover, certain vectors are capable of directing the expression of genes to which they are operatively-linked. Such vectors are referred to herein as “expression vectors.” Vectors for and that result in expression in a eukaryotic cell can be referred to herein as “eukaryotic expression vectors.” Common expression vectors of utility in recombinant DNA techniques are often in the form of plasmids.

[0913] In certain embodiments, a vector system includes promoter-guide expression cassette in reverse order.

[0914] Recombinant expression vectors can comprise a nucleic acid of the invention in a form suitable for expression of the nucleic acid in a host cell, which means that the recombinant expression vectors include one or more regulatory elements, which may be selected on the basis of the host cells to be used for expression, that is operatively-linked to the nucleic acid sequence to be expressed.

[0915] Advantageous vectors include lentiviruses and adeno-associated viruses, and types of such vectors can also be selected for targeting particular types of cells.

[0916] In some embodiments, one or more vectors driving expression of one or more elements of a nucleic acid-targeting system are introduced into a host cell such that expression of the elements of the nucleic acid-targeting system direct formation of a nucleic acid-targeting complex at one or more target sites. For example, a nucleic acid-targeting effector module and a nucleic acid-targeting guide RNA could each be operably linked to separate regulatory elements on separate vectors. RNA(s) of the nucleic acid-targeting system can be delivered to a transgenic nucleic acid-targeting effector module animal or mammal, e.g., an animal or mammal that constitutively or inducibly or conditionally expresses nucleic acid-targeting effector module; or an animal or mammal that is otherwise expressing nucleic acid-targeting effector modules or has cells containing nucleic acid-targeting effector modules, such as by way of prior administration thereto of a vector or vectors that code for and express in vivo nucleic acid-targeting effector modules. Alternatively, two or more of the elements expressed from the same or different regulatory elements, may be combined in a single vector, with one or more additional vectors providing any components of the nucleic acid-targeting system not included in the first vector. nucleic acid-targeting system elements that are combined in a single vector may be arranged in any suitable orientation, such as one element located 5′ with respect to (“upstream” of) or 3′ with respect to (“downstream” of) a second element. The coding sequence of one element may be located on the same or opposite strand of the coding sequence of a second element, and oriented in the same or opposite direction. In some embodiments, a single promoter drives expression of a transcript encoding a nucleic acid-targeting effector module and the nucleic acid-targeting guide RNA, embedded within one or more intron sequences (e.g., each in a different intron, two or more in at least one intron, or all in a single intron). In some embodiments, the nucleic acid-targeting effector module and the nucleic acid-targeting guide RNA may be operably linked to and expressed from the same promoter.

[0917] In an aspect, the invention provides in a vector system comprising one or more vectors, wherein the one or more vectors comprises: a) a first regulatory element operably linked to a nucleotide sequence encoding the engineered CRISPR protein as defined herein; and optionally b) a second regulatory element operably linked to one or more nucleotide sequences encoding one or more nucleic acid molecules comprising a guide RNA comprising a guide sequence, a direct repeat sequence, optionally wherein components (a) and (b) are located on same or different vectors.

### RNA

[0918] In some embodiments it is envisaged to introduce the RNA and/or protein directly to the host cell. For instance, the CRISPR effector can be delivered as CRISPR effector-encoding mRNA together with an in vitro transcribed guide RNA. Such methods can reduce the time to ensure effect of the CRISPR effector protein and further prevents long-term expression of the CRISPR system components.

[0919] In some embodiments the RNA molecules of the invention are delivered in liposome or lipofectin formulations and the like and can be prepared by methods well known to those skilled in the art. Such methods are described, for example, in U.S. Pat. Nos. 5,593,972, 5,589,466, and 5,580,859, which are herein incorporated by reference. Delivery systems aimed specifically at the enhanced and improved delivery of siRNA into mammalian cells have been developed, (see, for example, Shen et al FEBS Let. 2003, 539:111-114; Xia et al., Nat. Biotech. 2002, 20:1006-1010; Reich et al., Mol. Vision. 2003, 9: 210-216; Sorensen et al., J. Mol. Biol. 2003, 327: 761-766; Lewis et al., Nat. Gen. 2002, 32: 107-108 and Simeoni et al., NAR 2003, 31, 11: 2717-2724) and may be applied to the present invention. siRNA has recently been successfully used for inhibition of gene expression in primates (see for example. Tolentino et al., Retina 24(4):660 which may also be applied to the present invention.

[0920] Indeed, RNA delivery is a useful method of in vivo delivery. It is possible to deliver Cas and gRNA (and, for instance, HR repair template) into cells using liposomes or nanoparticles. Thus delivery of the CRISPR enzyme, such as a Cas and/or delivery of the RNAs of the invention may be in RNA form and via microvesicles, liposomes or particle or particles. For example, Cas mRNA and gRNA can be packaged into liposomal particles for delivery in vivo. Liposomal transfection reagents such as lipofectamine from Life Technologies and other reagents on the market can effectively deliver RNA molecules into the liver.

[0921] Means of delivery of RNA also preferred include delivery of RNA via particles (Cho, S., Goldberg, M., Son, S., Xu, Q., Yang, F., Mei, Y., Bogatyrev, S., Langer, R. and Anderson, D., Lipid-like nanoparticles for small interfering RNA delivery to endothelial cells, Advanced Functional Materials, 19: 3112-3118, 2010) or exosomes (Schroeder, A., Levins, C., Cortez, C., Langer, R., and Anderson, D., Lipid-based nanotherapeutics for siRNA delivery, Journal of Internal Medicine, 267: 9-21, 2010, PMID: 20059641). Indeed, exosomes have been shown to be particularly useful in delivery siRNA, a system with some parallels to the CRISPR system. For instance, El-Andaloussi S, et al. (“Exosome-mediated delivery of siRNA in vitro and in vivo.” Nat Protoc. 2012 December; 7(12):2112-26. doi: 10.1038/nprot.2012.131. Epub 2012 Nov. 15.) describe how exosomes are promising tools for drug delivery across different biological barriers and can be harnessed for delivery of siRNA in vitro and in vivo. Their approach is to generate targeted exosomes through transfection of an expression vector, comprising an exosomal protein fused with a peptide ligand. The exosomes are then purify and characterized from transfected cell supernatant, then RNA is loaded into the exosomes. Delivery or administration according to the invention can be performed with exosomes, in particular but not limited to the brain. Vitamin E (α-tocopherol) may be conjugated with CRISPR Cas and delivered to the brain along with high density lipoprotein (HDL), for example in a similar manner as was done by Uno et al. (HUMAN GENE THERAPY 22:711-719 (June 2011)) for delivering short-interfering RNA (siRNA) to the brain. Mice were infused via Osmotic minipumps (model 1007D; Alzet, Cupertino, Calif.) filled with phosphate-buffered saline (PBS) or free TocsiBACE or Toc-siBACE/HDL and connected with Brain Infusion Kit 3 (Alzet). A brain-infusion cannula was placed about 0.5 mm posterior to the bregma at midline for infusion into the dorsal third ventricle. Uno et al. found that as little as 3 nmol of Toc-siRNA with HDL could induce a target reduction in comparable degree by the same ICV infusion method. A similar dosage of CRISPR Cas conjugated to α-tocopherol and co-administered with HDL targeted to the brain may be contemplated for humans in the present invention, for example, about 3 nmol to about 3 μmol of CRISPR Cas targeted to the brain may be contemplated. Zou et al. ((HUMAN GENE THERAPY 22:465-475 (April 2011)) describes a method of lentiviral-mediated delivery of short-hairpin RNAs targeting PKCγ for in vivo gene silencing in the spinal cord of rats. Zou et al. administered about 10 μl of a recombinant lentivirus having a titer of 1×10⁹ transducing units (TU)/ml by an intrathecal catheter. A similar dosage of CRISPR Cas expressed in a lentiviral vector targeted to the brain may be contemplated for humans in the present invention, for example, about 10-50 ml of CRISPR Cas targeted to the brain in a lentivirus having a titer of 1×10⁹ transducing units (TU)/ml may be contemplated.

[0922] Vector delivery, e.g., plasmid, viral delivery: The CRISPR enzyme, for instance a Cas, and/or any of the present RNAs, for instance a guide RNA, can be delivered using any suitable vector, e.g., plasmid or viral vectors, such as adeno associated virus (AAV), lentivirus, adenovirus or other viral vector types, or combinations thereof. Cas and one or more guide RNAs can be packaged into one or more vectors, e.g., plasmid or viral vectors. In some embodiments, the vector, e.g., plasmid or viral vector is delivered to the tissue of interest by, for example, an intramuscular injection, while other times the delivery is via intravenous, transdermal, intranasal, oral, mucosal, or other delivery methods. Such delivery may be either via a single dose, or multiple doses. One skilled in the art understands that the actual dosage to be delivered herein may vary greatly depending upon a variety of factors, such as the vector choice, the target cell, organism, or tissue, the general condition of the subject to be treated, the degree of transformation/modification sought, the administration route, the administration mode, the type of transformation/modification sought, etc.

[0923] Such a dosage may further contain, for example, a carrier (water, saline, ethanol, glycerol, lactose, sucrose, calcium phosphate, gelatin, dextran, agar, pectin, peanut oil, sesame oil, etc.), a diluent, a pharmaceutically-acceptable carrier (e.g., phosphate-buffered saline), a pharmaceutically-acceptable excipient, and/or other compounds known in the art. The dosage may further contain one or more pharmaceutically acceptable salts such as, for example, a mineral acid salt such as a hydrochloride, a hydrobromide, a phosphate, a sulfate, etc.; and the salts of organic acids such as acetates, propionates, malonates, benzoates, etc. Additionally, auxiliary substances, such as wetting or emulsifying agents, pH buffering substances, gels or gelling materials, flavorings, colorants, microspheres, polymers, suspension agents, etc. may also be present herein. In addition, one or more other conventional pharmaceutical ingredients, such as preservatives, humectants, suspending agents, surfactants, antioxidants, anticaking agents, fillers, chelating agents, coating agents, chemical stabilizers, etc. may also be present, especially if the dosage form is a reconstitutable form. Suitable exemplary ingredients include microcrystalline cellulose, carboxymethylcellulose sodium, polysorbate 80, phenylethyl alcohol, chlorobutanol, potassium sorbate, sorbic acid, sulfur dioxide, propyl gallate, the parabens, ethyl vanillin, glycerin, phenol, parachlorophenol, gelatin, albumin and a combination thereof. A thorough discussion of pharmaceutically acceptable excipients is available in REMINGTON'S PHARMACEUTICAL SCIENCES (Mack Pub. Co., N.J. 1991) which is incorporated by reference herein.

### Viruses

[0924] Among vectors that may be used in the practice of the invention, integration in the host genome of a cell is possible with retrovirus gene transfer methods, often resulting in long term expression of the inserted transgene. In a preferred embodiment the retrovirus is a lentivirus. Additionally, high transduction efficiencies have been observed in many different cell types and target tissues. The tropism of a retrovirus can be altered by incorporating foreign envelope proteins, expanding the potential target population of target cells. A retrovirus can also be engineered to allow for conditional expression of the inserted transgene, such that only certain cell types are infected by the lentivirus. Cell type specific promoters can be used to target expression in specific cell types. Lentiviral vectors are retroviral vectors (and hence both lentiviral and retroviral vectors may be used in the practice of the invention). Moreover, lentiviral vectors are preferred as they are able to transduce or infect non-dividing cells and typically produce high viral titers. Selection of a retroviral gene transfer system may therefore depend on the target tissue. Retroviral vectors are comprised of cis-acting long terminal repeats with packaging capacity for up to 6-10 kb of foreign sequence. The minimum cis-acting LTRs are sufficient for replication and packaging of the vectors, which are then used to integrate the desired nucleic acid into the target cell to provide permanent expression. Widely used retroviral vectors that may be used in the practice of the invention include those based upon murine leukemia virus (MuLV), gibbon ape leukemia virus (GaLV), Simian Immuno deficiency virus (SIV), human immuno deficiency virus (HIV), and combinations thereof (see, e.g., Buchscher et al., (1992) J. Virol. 66:2731-2739; Johann et al., (1992) J. Virol. 66:1635-1640; Sommnerfelt et al., (1990) Virol. 176:58-59; Wilson et al., (1998) J. Virol. 63:2374-2378; Miller et al., (1991) J. Virol. 65:2220-2224; PCT/US94/05700). Zou et al. administered about 10 μl of a recombinant lentivirus having a titer of 1×109 transducing units (TU)/ml by an intrathecal catheter. These sort of dosages can be adapted or extrapolated to use of a retroviral or lentiviral vector in the present invention.

Vector Packaging of CRISPR proteins

[0925] Ways to package inventive Cas coding nucleic acid molecules, e.g., DNA, into vectors, e.g., viral vectors, to mediate genome modification in vivo include:
[0926] To achieve NHEJ-mediated gene knockout:
[0927] Single virus vector:
[0928] Vector containing two or more expression cassettes:
[0929] Promoter-Cas coding nucleic acid molecule-terminator
[0930] Promoter-gRNA1-terminator
[0931] Promoter-gRNA2-terminator
[0932] Promoter-gRNA(N)-terminator (up to size limit of vector)
[0933] Double virus vector:
[0934] Vector 1 containing one expression cassette for driving the expression of Cas
[0935] Promoter-Cas coding nucleic acid molecule-terminator
[0936] Vector 2 containing one more expression cassettes for driving the expression of one or more guideRNAs
[0937] Promoter-gRNA1-terminator
[0938] Promoter-gRNA(N)-terminator (up to size limit of vector)
[0939] To mediate homology-directed repair.
[0940] In addition to the single and double virus vector approaches described above, an additional vector can be used to deliver a homology-direct repair template.

[0941] The promoter used to drive Cas coding nucleic acid molecule expression can include:
[0942] AAV ITR can serve as a promoter: this is advantageous for eliminating the need for an additional promoter element (which can take up space in the vector). The additional space freed up can be used to drive the expression of additional elements (gRNA, etc.). Also, ITR activity is relatively weaker, so can be used to reduce potential toxicity due to over expression of Cas.
[0943] For ubiquitous expression, promoters that can be used include: CMV, CAG, CBh, PGK, SV40, Ferritin heavy or light chains, etc.

[0944] For brain or other CNS expression, can use promoters: SynapsinI for all neurons, CaMKIIalpha for excitatory neurons, GAD67 or GAD65 or VGAT for GABAergic neurons, etc.

[0945] For liver expression, can use Albumin promoter.

[0946] For lung expression, can use SP-B.

[0947] For endothelial cells, can use ICAM.

[0948] For hematopoietic cells can use IFNbeta or CD45.

[0949] For Osteoblasts can one can use the OG-2.

[0950] The promoter used to drive guide RNA can include:
[0951] Pol III promoters such as U6 or H1
[0952] Use of Pol II promoter and intronic cassettes to express gRNA

### Adeno Associated Virus (AAV)

[0953] Cas and one or more guide RNA can be delivered using adeno associated virus (AAV), lentivirus, adenovirus or other plasmid or viral vector types, in particular, using formulations and doses from, for example, U.S. Pat. No. 8,454,972 (formulations, doses for adenovirus), U.S. Pat. No. 8,404,658 (formulations, doses for AAV) and U.S. Pat. No. 5,846,946 (formulations, doses for DNA plasmids) and from clinical trials and publications regarding the clinical trials involving lentivirus, AAV and adenovirus. For examples, for AAV, the route of administration, formulation and dose can be as in U.S. Pat. No. 8,454,972 and as in clinical trials involving AAV. For Adenovirus, the route of administration, formulation and dose can be as in U.S. Pat. No. 8,404,658 and as in clinical trials involving adenovirus. For plasmid delivery, the route of administration, formulation and dose can be as in U.S. Pat. No. 5,846,946 and as in clinical studies involving plasmids. Doses may be based on or extrapolated to an average 70 kg individual (e.g. a male adult human), and can be adjusted for patients, subjects, mammals of different weight and species. Frequency of administration is within the ambit of the medical or veterinary practitioner (e.g., physician, veterinarian), depending on usual factors including the age, sex, general health, other conditions of the patient or subject and the particular condition or symptoms being addressed. The viral vectors can be injected into the tissue of interest. For cell-type specific genome modification, the expression of Cas can be driven by a cell-type specific promoter. For example, liver-specific expression might use the Albumin promoter and neuron-specific expression (e.g. for targeting CNS disorders) might use the Synapsin I promoter.

[0954] In terms of in vivo delivery, AAV is advantageous over other viral vectors for a couple of reasons:
[0955] Low toxicity (this may be due to the purification method not requiring ultra centrifugation of cell particles that can activate the immune response) and
[0956] Low probability of causing insertional mutagenesis because it doesn't integrate into the host genome.

[0957] AAV has a packaging limit of 4.5 or 4.75 Kb. This means that Cas as well as a promoter and transcription terminator have to be all fit into the same viral vector. Constructs larger than 4.5 or 4.75 Kb will lead to significantly reduced virus production. SpCas9 is quite large, the gene itself is over 4.1 Kb, which makes it difficult for packing into AAV. Therefore embodiments of the invention include utilizing homologs of Cas that are shorter. For example:

| Species | Cas9 Size (nt) |
|---|---|
| Corynebacter diphtheriae | 3252 |
| Eubacterium ventriosum | 3321 |
| Streptococcus pasteurianus | 3390 |
| Lactobacillus farciminis | 3378 |
| Sphaerochaeta globus | 3537 |
| Azospirillum B510 | 3504 |
| Gluconacetobacter diazotrophicus | 3150 |
| Neisseria cinerea | 3246 |
| Roseburia intestinalis | 3420 |
| Parvibaculum lavamentivorans | 3111 |
| Staphylococcus aureus | 3159 |
| Nitratifractor salsuginis DSM 16511 | 3396 |
| Campylobacter lari CF 89-12 | 3009 |
| Campylobacter jejuni | 2952 |
| Streptococcus thermophilus LMD-9 | 3396 |

[0958] rAAV vectors are preferably produced in insect cells, e.g., Spodoptera frugiperda Sf9 insect cells, grown in serum-free suspension culture. Serum-free insect cells can be purchased from commercial vendors, e.g., Sigma Aldrich (EX-CELL 405).

[0959] These species are therefore, in general, preferred Cas species.

[0960] As to AAV, the AAV can be AAV1, AAV2, AAV5 or any combination thereof. One can select the AAV of the AAV with regard to the cells to be targeted; e.g., one can select AAV serotypes 1, 2, 5 or a hybrid capsid AAV1, AAV2, AAV5 or any combination thereof for targeting brain or neuronal cells; and one can select AAV4 for targeting cardiac tissue. AAV8 is useful for delivery to the liver. The herein promoters and vectors are preferred individually. A tabulation of certain AAV serotypes as to these cells (see Grimm, D. et al, J. Virol. 82: 5887-5911 (2008)) is as follows:

| Cell Line | AAV-1 | AAV-2 | AAV-3 | AAV-4 | AAV-5 | AAV-6 | AAV-8 | AAV-9 |
|---|---|---|---|---|---|---|---|---|
| Huh-7 | 13 | 100 | 2.5 | 0.0 | 0.1 | 10 | 0.7 | 0.0 |
| HEK293 | 25 | 100 | 2.5 | 0.1 | 0.1 | 5 | 0.7 | 0.1 |
| HeLa | 3 | 100 | 2.0 | 0.1 | 6.7 | 1 | 0.2 | 0.1 |
| HepG2 | 3 | 100 | 16.7 | 0.3 | 1.7 | 5 | 0.3 | ND |
| Hep1A | 20 | 100 | 0.2 | 1.0 | 0.1 | 1 | 0.2 | 0.0 |
| 911 | 17 | 100 | 11 | 0.2 | 0.1 | 17 | 0.1 | ND |
| CHO | 100 | 100 | 14 | 1.4 | 333 | 50 | 10 | 1.0 |
| COS | 33 | 100 | 33 | 3.3 | 5.0 | 14 | 2.0 | 0.5 |
| MeWo | 10 | 100 | 20 | 0.3 | 6.7 | 10 | 1.0 | 0.2 |
| NIH3T3 | 10 | 100 | 2.9 | 2.9 | 0.3 | 10 | 0.3 | ND |
| A549 | 14 | 100 | 20 | ND | 0.5 | 10 | 0.5 | 0.1 |
| HT1180 | 20 | 100 | 10 | 0.1 | 0.3 | 33 | 0.5 | 0.1 |
| Monocytes | 1111 | 100 | ND | ND | 125 | 1429 | ND | ND |
| Immature DC | 2500 | 100 | ND | ND | 222 | 2857 | ND | ND |
| Mature DC | 2222 | 100 | ND | ND | 333 | 3333 | ND | ND |

### Lentivirus

[0961] Lentiviruses are complex retroviruses that have the ability to infect and express their genes in both mitotic and post-mitotic cells. The most commonly known lentivirus is the human immunodeficiency virus (HIV), which uses the envelope glycoproteins of other viruses to target a broad range of cell types.

[0962] Lentiviruses may be prepared as follows. After cloning pCasES10 (which contains a lentiviral transfer plasmid backbone), HEK293FT at low passage (p=5) were seeded in a T-75 flask to 50% confluence the day before transfection in DMEM with 10% fetal bovine serum and without antibiotics. After 20 hours, media was changed to OptiMEM (serum-free) media and transfection was done 4 hours later. Cells were transfected with 10 μg of lentiviral transfer plasmid (pCasES10) and the following packaging plasmids: 5 μg of pMD2.G (VSV-g pseudotype), and 7.5 ug of psPAX2 (gag/pol/rev/tat). Transfection was done in 4 mL OptiMEM with a cationic lipid delivery agent (50 uL Lipofectamine 2000 and 100 ul Plus reagent). After 6 hours, the media was changed to antibiotic-free DMEM with 10% fetal bovine serum. These methods use serum during cell culture, but serum-free methods are preferred.

[0963] Lentivirus may be purified as follows. Viral supernatants were harvested after 48 hours. Supernatants were first cleared of debris and filtered through a 0.45 um low protein binding (PVDF) filter. They were then spun in a ultracentrifuge for 2 hours at 24,000 rpm. Viral pellets were resuspended in 50 ul of DMEM overnight at 4C. They were then aliquoted and immediately frozen at −80° C.

[0964] In another embodiment, minimal non-primate lentiviral vectors based on the equine infectious anemia virus (EIAV) are also contemplated, especially for ocular gene therapy (see, e.g., Balagaan, J Gene Med 2006; 8: 275-285). In another embodiment, RetinoStat®, an equine infectious anemia virus-based lentiviral gene therapy vector that expresses angiostatic proteins endostatin and angiostatin that is delivered via a subretinal injection for the treatment of the web form of age-related macular degeneration is also contemplated (see, e.g., Binley et al., HUMAN GENE THERAPY 23:980-991 (September 2012)) and this vector may be modified for the CRISPR-Cas system of the present invention.

[0965] In another embodiment, self-inactivating lentiviral vectors with an siRNA targeting a common exon shared by HIV tat/rev, a nucleolar-localizing TAR decoy, and an anti-CCR5-specific hammerhead ribozyme (see, e.g., DiGiusto et al. (2010) Sci Transl Med 2:36ra43) may be used/and or adapted to the CRISPR-Cas system of the present invention. A minimum of 2.5×106 CD34+ cells per kilogram patient weight may be collected and prestimulated for 16 to 20 hours in X-VIVO 15 medium (Lonza) containing 2 μmol/L-glutamine, stem cell factor (100 ng/ml), Flt-3 ligand (Flt-3L) (100 ng/ml), and thrombopoietin (10 ng/ml) (CellGenix) at a density of 2×106 cells/ml. Prestimulated cells may be transduced with lentiviral at a multiplicity of infection of 5 for 16 to 24 hours in 75-cm2 tissue culture flasks coated with fibronectin (25 mg/cm2) (RetroNectin, Takara Bio Inc.).

[0966] Lentiviral vectors have been disclosed as in the treatment for Parkinson's Disease, see, e.g., US Patent Publication No. 20120295960 and U.S. Pat. Nos. 7,303,910 and 7,351,585. Lentiviral vectors have also been disclosed for the treatment of ocular diseases, see e.g., US Patent Publication Nos. 20060281180, 20090007284, US20110117189; US20090017543; US20070054961, US20100317109. Lentiviral vectors have also been disclosed for delivery to the brain, see, e.g., US Patent Publication Nos. US20110293571; US20110293571, US20040013648, US20070025970, US20090111106 and U.S. Pat. No. 7,259,015.

### Use of Minimal Promoters

[0967] The present application provides a vector for delivering an effector protein and at least one CRISPR guide RNA to a cell comprising a minimal promoter operably linked to a polynucleotide sequence encoding the effector protein and a second minimal promoter operably linked to a polynucleotide sequence encoding at least one guide RNA, wherein the length of the vector sequence comprising the minimal promoters and polynucleotide sequences is less than 4.4 Kb. In an embodiment, the vector is an AAV vector. In another embodiment, the effector protein is a CRISPR enzyme. In a further embodiment, the CRISPR enzyme is SaCas9, Cpf1, Cas13b or C2c2.

[0968] In a related aspect, the invention provides a lentiviral vector for delivering an effector protein and at least one CRISPR guide RNA to a cell comprising a promoter operably linked to a polynucleotide sequence encoding Cas and a second promoter operably linked to a polynucleotide sequence encoding at least one guide RNA, wherein the polynucleotide sequences are in reverse orientation.

[0969] In another aspect, the invention provides a method of expressing an effector protein and guide RNA in a cell comprising introducing the vector according any of the vector delivery systems disclosed herein. In an embodiment of the vector for delivering an effector protein, the minimal promoter is the Mecp2 promoter, tRNA promoter, or U6. In a further embodiment, the minimal promoter is tissue specific.

### Dosage of Vectors

[0970] In some embodiments, the vector, e.g., plasmid or viral vector is delivered to the tissue of interest by, for example, an intramuscular injection, while other times the delivery is via intravenous, transdermal, intranasal, oral, mucosal, or other delivery methods. Such delivery may be either via a single dose, or multiple doses. One skilled in the art understands that the actual dosage to be delivered herein may vary greatly depending upon a variety of factors, such as the vector choice, the target cell, organism, or tissue, the general condition of the subject to be treated, the degree of transformation/modification sought, the administration route, the administration mode, the type of transformation/modification sought, etc.

[0971] Such a dosage may further contain, for example, a carrier (water, saline, ethanol, glycerol, lactose, sucrose, calcium phosphate, gelatin, dextran, agar, pectin, peanut oil, sesame oil, etc.), a diluent, a pharmaceutically-acceptable carrier (e.g., phosphate-buffered saline), a pharmaceutically-acceptable excipient, and/or other compounds known in the art. The dosage may further contain one or more pharmaceutically acceptable salts such as, for example, a mineral acid salt such as a hydrochloride, a hydrobromide, a phosphate, a sulfate, etc.; and the salts of organic acids such as acetates, propionates, malonates, benzoates, etc. Additionally, auxiliary substances, such as wetting or emulsifying agents, pH buffering substances, gels or gelling materials, flavorings, colorants, microspheres, polymers, suspension agents, etc. may also be present herein. In addition, one or more other conventional pharmaceutical ingredients, such as preservatives, humectants, suspending agents, surfactants, antioxidants, anticaking agents, fillers, chelating agents, coating agents, chemical stabilizers, etc. may also be present, especially if the dosage form is a reconstitutable form. Suitable exemplary ingredients include microcrystalline cellulose, carboxymethylcellulose sodium, polysorbate 80, phenylethyl alcohol, chlorobutanol, potassium sorbate, sorbic acid, sulfur dioxide, propyl gallate, the parabens, ethyl vanillin, glycerin, phenol, parachlorophenol, gelatin, albumin and a combination thereof. A thorough discussion of pharmaceutically acceptable excipients is available in REMINGTON'S PHARMACEUTICAL SCIENCES (Mack Pub. Co., N.J. 1991) which is incorporated by reference herein.

[0972] In an embodiment herein the delivery is via an adenovirus, which may be at a single booster dose containing at least 1×10⁵ particles (also referred to as particle units, pu) of adenoviral vector. In an embodiment herein, the dose preferably is at least about 1×10⁶ particles (for example, about 1×10⁶-1×10¹² particles), more preferably at least about 1×10⁷ particles, more preferably at least about 1×10⁸ particles (e.g., about 1×10⁸-1×10¹¹ particles or about 1×10⁸-1×10¹² particles), and most preferably at least about 1×10⁰ particles (e.g., about 1×10⁹-1×10¹⁰ particles or about 1×10⁹-1×10¹² particles), or even at least about 1×10¹⁰ particles (e.g., about 1×10¹⁰-1×10¹² particles) of the adenoviral vector. Alternatively, the dose comprises no more than about 1×10¹⁴ particles, preferably no more than about 1×10¹³ particles, even more preferably no more than about 1×10¹² particles, even more preferably no more than about 1×10¹¹ particles, and most preferably no more than about 1×10¹⁰ particles (e.g., no more than about 1×10⁹ articles). Thus, the dose may contain a single dose of adenoviral vector with, for example, about 1×10⁶ particle units (pu), about 2×10⁶ pu, about 4×10⁶ pu, about 1×10⁷ pu, about 2×10⁷ pu, about 4×10⁷ pu, about 1×10⁸ pu, about 2×10⁸ pu, about 4×10⁸ pu, about 1×10⁹ pu, about 2×10⁹ pu, about 4×10⁹ pu, about 1×10¹⁰ pu, about 2×10¹⁰ pu, about 4×10¹⁰ pu, about 1×10¹¹ pu, about 2×10¹¹ pu, about 4×10¹¹ pu, about 1×10¹² pu, about 2×10¹² pu, or about 4×10¹² pu of adenoviral vector. See, for example, the adenoviral vectors in U.S. Pat. No. 8,454,972 B2 to Nabel, et. al., granted on Jun. 4, 2013; incorporated by reference herein, and the dosages at col 29, lines 36-58 thereof. In an embodiment herein, the adenovirus is delivered via multiple doses.

[0973] In an embodiment herein, the delivery is via an AAV. A therapeutically effective dosage for in vivo delivery of the AAV to a human is believed to be in the range of from about 20 to about 50 ml of saline solution containing from about 1×10¹⁰ to about 1×10¹⁰ functional AAV/ml solution. The dosage may be adjusted to balance the therapeutic benefit against any side effects. In an embodiment herein, the AAV dose is generally in the range of concentrations of from about 1×10⁵ to 1×10⁵⁰ genomes AAV, from about 1×10⁸ to 1×10²⁰ genomes AAV, from about 1×10¹⁰ to about 1×10¹⁶ genomes, or about 1×10¹¹ to about 1×10¹⁶ genomes AAV. A human dosage may be about 1×10¹³ genomes AAV. Such concentrations may be delivered in from about 0.001 ml to about 100 ml, about 0.05 to about 50 ml, or about 10 to about 25 ml of a carrier solution. Other effective dosages can be readily established by one of ordinary skill in the art through routine trials establishing dose response curves. See, for example, U.S. Pat. No. 8,404,658 B2 to Hajjar, et al., granted on Mar. 26, 2013, at col. 27, lines 45-60.

[0974] In an embodiment herein the delivery is via a plasmid. In such plasmid compositions, the dosage should be a sufficient amount of plasmid to elicit a response. For instance, suitable quantities of plasmid DNA in plasmid compositions can be from about 0.1 to about 2 mg, or from about 1 μg to about 10 μg per 70 kg individual. Plasmids of the invention will generally comprise (i) a promoter; (ii) a sequence encoding a CRISPR enzyme, operably linked to said promoter; (iii) a selectable marker; (iv) an origin of replication; and (v) a transcription terminator downstream of and operably linked to (ii). The plasmid can also encode the RNA components of a CRISPR complex, but one or more of these may instead be encoded on a different vector.

[0975] The doses herein are based on an average 70 kg individual. The frequency of administration is within the ambit of the medical or veterinary practitioner (e.g., physician, veterinarian), or scientist skilled in the art. It is also noted that mice used in experiments are typically about 20 g and from mice experiments one can scale up to a 70 kg individual.

[0976] The dosage used for the compositions provided herein include dosages for repeated administration or repeat dosing. In particular embodiments, the administration is repeated within a period of several weeks, months, or years. Suitable assays can be performed to obtain an optimal dosage regime. Repeated administration can allow the use of lower dosage, which can positively affect off-target modifications.

### RNA Delivery

[0977] In particular embodiments, RNA based delivery is used. In these embodiments, mRNA of the CRISPR effector protein is delivered together with in vitro transcribed guide RNA. Liang et al. describes efficient genome editing using RNA based delivery (Protein Cell. 2015 May; 6(5): 363-372).

[0978] RNA delivery: The CRISPR enzyme, for instance a Cas, and/or any of the present RNAs, for instance a guide RNA, can also be delivered in the form of RNA. Cas mRNA can be generated using in vitro transcription. For example, Cas mRNA can be synthesized using a PCR cassette containing the following elements: T7_promoter-kozak sequence (GCCACC)-Cas-3′ UTR from beta globin-polyA tail (a string of 120 or more adenines). The cassette can be used for transcription by T7 polymerase. Guide RNAs can also be transcribed using in vitro transcription from a cassette containing T7_promoter-GG-guide RNA sequence.

[0979] To enhance expression and reduce possible toxicity, the CRISPR enzyme-coding sequence and/or the guide RNA can be modified to include one or more modified nucleoside e.g. using pseudo-U or 5-Methyl-C.

[0980] mRNA delivery methods are especially promising for liver delivery currently.

[0981] Much clinical work on RNA delivery has focused on RNAi or antisense, but these systems can be adapted for delivery of RNA for implementing the present invention. References below to RNAi etc. should be read accordingly.

[0982] CRISPR enzyme mRNA and guide RNA might also be delivered separately. CRISPR enzyme mRNA can be delivered prior to the guide RNA to give time for CRISPR enzyme to be expressed. CRISPR enzyme mRNA might be administered 1-12 hours (preferably around 2-6 hours) prior to the administration of guide RNA.

[0983] Alternatively, CRISPR enzyme mRNA and guide RNA can be administered together. Advantageously, a second booster dose of guide RNA can be administered 1-12 hours (preferably around 2-6 hours) after the initial administration of CRISPR enzyme mRNA+guide RNA.

### RNP

[0984] In particular embodiments, pre-complexed guide RNA and CRISPR effector protein are delivered as a ribonucleoprotein (RNP). RNPs have the advantage that they lead to rapid editing effects even more so than the RNA method because this process avoids the need for transcription. An important advantage is that both RNP delivery is transient, reducing off-target effects and toxicity issues. Efficient genome editing in different cell types has been observed by Kim et al. (2014, Genome Res. 24(6):1012-9), Paix et al. (2015, Genetics 204(1):47-54), Chu et al. (2016, BMC Biotechnol. 16:4), and Wang et al. (2013, Cell. 9; 153(4):910-8).

[0985] In particular embodiments, the ribonucleoprotein is delivered by way of a polypeptide-based shuttle agent as described in WO2016161516. WO2016161516 describes efficient transduction of polypeptide cargos using synthetic peptides comprising an endosome leakage domain (ELD) operably linked to a cell penetrating domain (CPD), to a histidine-rich domain and a CPD. Similarly these polypeptides can be used for the delivery of CRISPR-effector based RNPs in eukaryotic cells.

[0986] Indeed, RNA delivery is a useful method of in vivo delivery. It is possible to deliver Cas and gRNA (and, for instance, HR repair template) into cells using liposomes or particles. Thus delivery of the CRISPR enzyme, such as a Cas and/or delivery of the RNAs of the invention may be in RNA form and via microvesicles, liposomes or particles. For example, Cas mRNA and gRNA can be packaged into liposomal particles for delivery in vivo. Liposomal transfection reagents such as lipofectamine from Life Technologies and other reagents on the market can effectively deliver RNA molecules into the liver.

[0987] Means of delivery of RNA also preferred include delivery of RNA via nanoparticles (Cho, S., Goldberg, M., Son, S., Xu, Q., Yang, F., Mei, Y., Bogatyrev, S., Langer, R. and Anderson, D., Lipid-like nanoparticles for small interfering RNA delivery to endothelial cells, Advanced Functional Materials, 19: 3112-3118, 2010) or exosomes (Schroeder, A., Levins, C., Cortez, C., Langer, R., and Anderson, D., Lipid-based nanotherapeutics for siRNA delivery, Journal of Internal Medicine, 267: 9-21, 2010, PMID: 20059641). Indeed, exosomes have been shown to be particularly useful in delivery siRNA, a system with some parallels to the CRISPR system. For instance, El-Andaloussi S, et al. (“Exosome-mediated delivery of siRNA in vitro and in vivo.” Nat Protoc. 2012 December; 7(12):2112-26. doi: 10.1038/nprot.2012.131. Epub 2012 Nov. 15.) describe how exosomes are promising tools for drug delivery across different biological barriers and can be harnessed for delivery of siRNA in vitro and in vivo. Their approach is to generate targeted exosomes through transfection of an expression vector, comprising an exosomal protein fused with a peptide ligand. The exosomes are then purify and characterized from transfected cell supernatant, then RNA is loaded into the exosomes. Delivery or administration according to the invention can be performed with exosomes, in particular but not limited to the brain. Vitamin E (α-tocopherol) may be conjugated with CRISPR Cas and delivered to the brain along with high density lipoprotein (HDL), for example in a similar manner as was done by Uno et al. (HUMAN GENE THERAPY 22:711-719 (June 2011)) for delivering short-interfering RNA (siRNA) to the brain. Mice were infused via Osmotic minipumps (model 1007D; Alzet, Cupertino, Calif.) filled with phosphate-buffered saline (PBS) or free TocsiBACE or Toc-siBACE/HDL and connected with Brain Infusion Kit 3 (Alzet). A brain-infusion cannula was placed about 0.5 mm posterior to the bregma at midline for infusion into the dorsal third ventricle. Uno et al. found that as little as 3 nmol of Toc-siRNA with HDL could induce a target reduction in comparable degree by the same ICV infusion method. A similar dosage of CRISPR Cas conjugated to α-tocopherol and co-administered with HDL targeted to the brain may be contemplated for humans in the present invention, for example, about 3 nmol to about 3 μmol of CRISPR Cas targeted to the brain may be contemplated.

[0988] Zou et al. ((HUMAN GENE THERAPY 22:465-475 (April 2011)) describes a method of lentiviral-mediated delivery of short-hairpin RNAs targeting PKCγ for in vivo gene silencing in the spinal cord of rats. Zou et al. administered about 10 μl of a recombinant lentivirus having a titer of 1×109 transducing units (TU)/ml by an intrathecal catheter. A similar dosage of CRISPR Cas expressed in a lentiviral vector may be contemplated for humans in the present invention, for example, about 10-50 ml of CRISPR Cas in a lentivirus having a titer of 1×109 transducing units (TU)/ml may be contemplated. A similar dosage of CRISPR Cas expressed in a lentiviral vector targeted to the brain may be contemplated for humans in the present invention, for example, about 10-50 ml of CRISPR Cas targeted to the brain in a lentivirus having a titer of 1×109 transducing units (TU)/ml may be contemplated.

[0989] Anderson et al. (US 20170079916) provides a modified dendrimer nanoparticle for the delivery of therapeutic, prophylactic and/or diagnostic agents to a subject, comprising: one or more zero to seven generation alkylated dendrimers; one or more amphiphilic polymers; and one or more therapeutic, prophylactic and/or diagnostic agents encapsulated therein. One alkylated dendrimer may be selected from the group consisting of poly(ethyleneimine), poly(polyproylenimine), diaminobutane amine polypropylenimine tetramine and poly(amido amine). The therapeutic, prophylactic and diagnostic agent may be selected from the group consisting of proteins, peptides, carbohydrates, nucleic acids, lipids, small molecules and combinations thereof.

[0990] Anderson et al. (US 20160367686) provides a compound of Formula (I):

[chemical structure]

[0991] and salts thereof, wherein each instance of R L is independently optionally substituted C6-C40 alkenyl, and a composition for the delivery of an agent to a subject or cell comprising the compound, or a salt thereof; an agent; and optionally, an excipient. The agent may be an organic molecule, inorganic molecule, nucleic acid, protein, peptide, polynucleotide, targeting agent, an isotopically labeled chemical compound, vaccine, an immunological agent, or an agent useful in bioprocessing. The composition may further comprise cholesterol, a PEGylated lipid, a phospholipid, or an apolipoprotein.

[0992] Anderson et al. (US20150232883) provides a delivery particle formulations and/or systems, preferably nanoparticle delivery formulations and/or systems, comprising (a) a CRISPR-Cas system RNA polynucleotide sequence; or (b) Cas9; or (c) both a CRISPR-Cas system RNA polynucleotide sequence and Cas9; or (d) one or more vectors that contain nucleic acid molecule(s) encoding (a), (b) or (c), wherein the CRISPR-Cas system RNA polynucleotide sequence and the Cas9 do not naturally occur together. The delivery particle formulations may further comprise a surfactant, lipid or protein, wherein the surfactant may comprise a cationic lipid.

[0993] Anderson et al. (US20050123596) provides examples of microparticles that are designed to release their payload when exposed to acidic conditions, wherein the microparticles comprise at least one agent to be delivered, a pH triggering agent, and a polymer, wherein the polymer is selected from the group of polymethacrylates and polyacrylates.

[0994] Anderson et al (US 20020150626) provides lipid-protein-sugar particles for delivery of nucleic acids, wherein the polynucleotide is encapsulated in a lipid-protein-sugar matrix by contacting the polynucleotide with a lipid, a protein, and a sugar; and spray drying mixture of the polynucleotide, the lipid, the protein, and the sugar to make microparticles.

[0995] In terms of local delivery to the brain, this can be achieved in various ways. For instance, material can be delivered intrastriatally e.g. by injection. Injection can be performed stereotactically via a craniotomy.

[0996] Enhancing NHEJ or HR efficiency is also helpful for delivery. It is preferred that NHEJ efficiency is enhanced by co-expressing end-processing enzymes such as Trex2 (Dumitrache et al. Genetics. 2011 August; 188(4): 787-797). It is preferred that HR efficiency is increased by transiently inhibiting NHEJ machineries such as Ku70 and Ku86. HR efficiency can also be increased by co-expressing prokaryotic or eukaryotic homologous recombination enzymes such as RecBCD, RecA.

### Particles

[0997] In some aspects or embodiments, a composition comprising a delivery particle formulation may be used. In some aspects or embodiments, the formulation comprises a CRISPR complex, the complex comprising a CRISPR protein and-a guide which directs sequence-specific binding of the CRISPR complex to a target sequence. In some embodiments, the delivery particle comprises a lipid-based particle, optionally a lipid nanoparticle, or cationic lipid and optionally biodegradable polymer. In some embodiments, the cationic lipid comprises 1,2-dioleoyl-3-trimethylammonium-propane (DOTAP). In some embodiments, the hydrophilic polymer comprises ethylene glycol or polyethylene glycol. In some embodiments, the delivery particle further comprises a lipoprotein, preferably cholesterol. In some embodiments, the delivery particles are less than 500 nm in diameter, optionally less than 250 nm in diameter, optionally less than 100 nm in diameter, optionally about 35 nm to about 60 nm in diameter.

[0998] Several types of particle delivery systems and/or formulations are known to be useful in a diverse spectrum of biomedical applications. In general, a particle is defined as a small object that behaves as a whole unit with respect to its transport and properties. Particles are further classified according to diameter. Coarse particles cover a range between 2,500 and 10,000 nanometers. Fine particles are sized between 100 and 2,500 nanometers. Ultrafine particles, or nanoparticles, are generally between 1 and 100 nanometers in size. The basis of the 100-nm limit is the fact that novel properties that differentiate particles from the bulk material typically develop at a critical length scale of under 100 nm.

[0999] As used herein, a particle delivery system/formulation is defined as any biological delivery system/formulation which includes a particle in accordance with the present invention. A particle in accordance with the present invention is any entity having a greatest dimension (e.g. diameter) of less than 100 microns (μm). In some embodiments, inventive particles have a greatest dimension of less than 10 i m. In some embodiments, inventive particles have a greatest dimension of less than 2000 nanometers (nm). In some embodiments, inventive particles have a greatest dimension of less than 1000 nanometers (nm). In some embodiments, inventive particles have a greatest dimension of less than 900 nm, 800 nm, 700 nm, 600 nm, 500 nm, 400 nm, 300 nm, 200 nm, or 100 nm. Typically, inventive particles have a greatest dimension (e.g., diameter) of 500 nm or less. In some embodiments, inventive particles have a greatest dimension (e.g., diameter) of 250 nm or less. In some embodiments, inventive particles have a greatest dimension (e.g., diameter) of 200 nm or less. In some embodiments, inventive particles have a greatest dimension (e.g., diameter) of 150 nm or less. In some embodiments, inventive particles have a greatest dimension (e.g., diameter) of 100 nm or less. Smaller particles, e.g., having a greatest dimension of 50 nm or less are used in some embodiments of the invention. In some embodiments, inventive particles have a greatest dimension ranging between 25 nm and 200 nm.

[1000] In terms of this invention, it is preferred to have one or more components of CRISPR complex, e.g., CRISPR enzyme or mRNA or guide RNA delivered using nanoparticles or lipid envelopes. Other delivery systems or vectors are may be used in conjunction with the nanoparticle aspects of the invention.

[1001] In general, a “nanoparticle” refers to any particle having a diameter of less than 1000 nm. In certain preferred embodiments, nanoparticles of the invention have a greatest dimension (e.g., diameter) of 500 nm or less. In other preferred embodiments, nanoparticles of the invention have a greatest dimension ranging between 25 nm and 200 nm. In other preferred embodiments, nanoparticles of the invention have a greatest dimension of 100 nm or less. In other preferred embodiments, nanoparticles of the invention have a greatest dimension ranging between 35 nm and 60 nm. It will be appreciated that reference made herein to particles or nanoparticles can be interchangeable, where appropriate.

[1002] It will be understood that the size of the particle will differ depending as to whether it is measured before or after loading. Accordingly, in particular embodiments, the term “nanoparticles” may apply only to the particles pre loading.

[1003] Nanoparticles encompassed in the present invention may be provided in different forms, e.g., as solid nanoparticles (e.g., metal such as silver, gold, iron, titanium), non-metal, lipid-based solids, polymers), suspensions of nanoparticles, or combinations thereof. Metal, dielectric, and semiconductor nanoparticles may be prepared, as well as hybrid structures (e.g., core-shell nanoparticles). Nanoparticles made of semiconducting material may also be labeled quantum dots if they are small enough (typically sub 10 nm) that quantization of electronic energy levels occurs. Such nanoscale particles are used in biomedical applications as drug carriers or imaging agents and may be adapted for similar purposes in the present invention.

[1004] Semi-solid and soft nanoparticles have been manufactured, and are within the scope of the present invention. A prototype nanoparticle of semi-solid nature is the liposome. Various types of liposome nanoparticles are currently used clinically as delivery systems for anticancer drugs and vaccines. Nanoparticles with one half hydrophilic and the other half hydrophobic are termed Janus particles and are particularly effective for stabilizing emulsions. They can self-assemble at water/oil interfaces and act as solid surfactants.

[1005] Particle characterization (including e.g., characterizing morphology, dimension, etc.) is done using a variety of different techniques. Common techniques are electron microscopy (TEM, SEM), atomic force microscopy (AFM), dynamic light scattering (DLS), X-ray photoelectron spectroscopy (XPS), powder X-ray diffraction (XRD), Fourier transform infrared spectroscopy (FTIR), matrix-assisted laser desorption/ionization time-of-flight mass spectrometry (MALDI-TOF), ultraviolet-visible spectroscopy, dual polarization interferometry and nuclear magnetic resonance (NMR). Characterization (dimension measurements) may be made as to native particles (i.e., preloading) or after loading of the cargo (herein cargo refers to e.g., one or more components of CRISPR-Cas system e.g., CRISPR enzyme or mRNA or guide RNA, or any combination thereof, and may include additional carriers and/or excipients) to provide particles of an optimal size for delivery for any in vitro, ex vivo and/or in vivo application of the present invention. In certain preferred embodiments, particle dimension (e.g., diameter) characterization is based on measurements using dynamic laser scattering (DLS). Mention is made of U.S. Pat. Nos. 8,709,843; 6,007,845; 5,855,913; 5,985,309; 5,543,158; and the publication by James E.

[1006] Dahlman and Carmen Barnes et al. Nature Nanotechnology (2014) published online 11 May 2014, doi:10.1038/nnano.2014.84, concerning particles, methods of making and using them and measurements thereof.

[1007] Particles delivery systems within the scope of the present invention may be provided in any form, including but not limited to solid, semi-solid, emulsion, or colloidal particles. As such any of the delivery systems described herein, including but not limited to, e.g., lipid-based systems, liposomes, micelles, microvesicles, exosomes, or gene gun may be provided as particle delivery systems within the scope of the present invention.

[1008] CRISPR enzyme mRNA and guide RNA may be delivered simultaneously using particles or lipid envelopes; for instance, CRISPR enzyme and RNA of the invention, e.g., as a complex, can be delivered via a particle as in Dahlman et al., WO2015089419 A2 and documents cited therein, such as 7C1 (see, e.g., James E. Dahlman and Carmen Barnes et al. Nature Nanotechnology (2014) published online 11 May 2014, doi:10.1038/nnano.2014.84), e.g., delivery particle comprising lipid or lipidoid and hydrophilic polymer, e.g., cationic lipid and hydrophilic polymer, for instance wherein the cationic lipid comprises 1,2-dioleoyl-3-trimethylammonium-propane (DOTAP) or 1,2-ditetradecanoyl-sn-glycero-3-phosphocholine (DMPC) and/or wherein the hydrophilic polymer comprises ethylene glycol or polyethylene glycol (PEG); and/or wherein the particle further comprises cholesterol (e.g., particle from formulation 1=DOTAP 100, DMPC 0, PEG 0, Cholesterol 0; formulation number 2=DOTAP 90, DMPC 0, PEG 10, Cholesterol 0; formulation number 3=DOTAP 90, DMPC 0, PEG 5, Cholesterol 5), wherein particles are formed using an efficient, multistep process wherein first, effector protein and RNA are mixed together, e.g., at a 1:1 molar ratio, e.g., at room temperature, e.g., for 30 minutes, e.g., in sterile, nuclease free 1×PBS; and separately, DOTAP, DMPC, PEG, and cholesterol as applicable for the formulation are dissolved in alcohol, e.g., 100% ethanol; and, the two solutions are mixed together to form particles containing the complexes).

[1009] Nucleic acid-targeting effector proteins (such as a Type V protein such Cpf1) mRNA and guide RNA may be delivered simultaneously using particles or lipid envelopes. Examples of suitable particles include but are not limited to those described in U.S. Pat. No. 9,301,923.

[1010] For example, Su X, Fricke J, Kavanagh D G, Irvine D J (“In vitro and in vivo mRNA delivery using lipid-enveloped pH-responsive polymer nanoparticles” Mol Pharm. 2011 Jun. 6; 8(3):774-87. doi: 10.1021/mp100390w. Epub 2011 Apr. 1) describes biodegradable core-shell structured nanoparticles with a poly(β-amino ester) (PBAE) core enveloped by a phospholipid bilayer shell. These were developed for in vivo mRNA delivery. The pH-responsive PBAE component was chosen to promote endosome disruption, while the lipid surface layer was selected to minimize toxicity of the polycation core. Such are, therefore, preferred for delivering RNA of the present invention.

[1011] Liu et al. (US 20110212179) provides bimodal porous polymer microspheres comprising a base polymer, wherein the particle comprises macropores having a diameter ranging from about 20 to about 500 microns and micropores having a diameter ranging from about 1 to about 70 microns, and wherein the microspheres have a diameter ranging from about 50 to about 1100 microns.

[1012] Berg et al. (US20160174546) a nanolipid delivery system, in particular a nano-particle concentrate, comprising: a composition comprising a lipid, oil or solvent, the composition having a viscosity of less than 100 cP at 25.degree. C. and a Kauri Butanol solvency of greater than 25 Kb; and at least one amphipathic compound selected from the group consisting of an alkoxylated lipid, an alkoxylated fatty acid, an alkoxylated alcohol, a heteroatomic hydrophilic lipid, a heteroatomic hydrophilic fatty acid, a heteroatomic hydrophilic alcohol, a diluent, and combinations thereof, wherein the compound is derived from a starting compound having a viscosity of less than 1000 cP at 50.degree. C., wherein the concentrate is configured to provide a stable nano emulsion having a D50 and a mean average particle size distribution of less than 100 nm when diluted.

[1013] Liu et al. (US 20140301951) provides a protocell nanostructure comprising: a porous particle core comprising a plurality of pores; and at least one lipid bilayer surrounding the porous particle core to form a protocell, wherein the protocell is capable of loading one or more cargo components to the plurality of pores of the porous particle core and releasing the one or more cargo components from the porous particle core across the surrounding lipid bilayer.

[1014] Chromy et al. (US 20150105538) provides methods and systems for assembling, solubilizing and/or purifying a membrane associated protein in a nanolipoprotein particle, which comprise a temperature transition cycle performed in presence of a detergent, wherein during the temperature transition cycle the nanolipoprotein components are brought to a temperature above and below the gel to liquid crystallin transition temperature of the membrane forming lipid of the nanolipoprotein particle.

[1015] Bader et al. (US 20150250725), provides a method for producing a lipid particle comprising the following: i) providing a first solution comprising denatured apolipoprotein, ii) adding the first solution to a second solution comprising at least two lipids and a detergent but no apolipoprotein, and iii) removing the detergent from the solution obtained in ii) and thereby producing a lipid particle.

[1016] Mirkin et al., (US20100129793) provides a method of preparing a composite particle comprising the steps of (a) admixing a dielectric component and a magnetic component to form a first intermediate, (b) admixing the first intermediate and gold seeds to form a second intermediate, and (c) forming a gold shell on the second intermediate by admixing the second intermediate with a gold source and a reducing agent to form said composite particle.

[1017] Other gold nanoparticle-based systems are also contemplated. In one embodiment, Cas9 RNP can be delivered in a vehicle composed of gold nanoparticles conjugated with DNA, which are complexed with donor DNA, Cas9 RNP, and the endosomal disruptive polymer PAsp(DET). See, e.g. Lee et al., “Nanoparticle delivery of Cas9 ribonucleoprotein and donor DNA in vivo induces homology-directed DNA repair” Nat Biomed Eng. 2017; 1: 889-901. In another embodiment, Cas9 RNP can be delivered into the cell cytoplasm and nucleus using arginine-functionalized gold nanoparticles. See, e.g. Mout et al., “Cytosolic and Nuclear Delivery of CRISPR/Cas9-ribonucleoprotein for Gene Editing Using Arginine Functionalized Gold Nanoparticles” Bio Protoc. 2017 Oct. 20; 7(20).

[1018] In one embodiment, particles/nanoparticles based on self-assembling bioadhesive polymers are contemplated, which may be applied to oral delivery of peptides, intravenous delivery of peptides and nasal delivery of peptides, all to the brain. Other embodiments, such as oral absorption and ocular delivery of hydrophobic drugs are also contemplated. The molecular envelope technology involves an engineered polymer envelope which is protected and delivered to the site of the disease (see, e.g., Mazza, M. et al. ACSNano, 2013. 7(2): 1016-1026; Siew, A., et al. Mol Pharm, 2012. 9(1):14-28; Lalatsa, A., et al. J Contr Rel, 2012. 161(2):523-36; Lalatsa, A., et al., Mol Pharm, 2012. 9(6):1665-80; Lalatsa, A., et al. Mol Pharm, 2012. 9(6):1764-74; Garrett, N. L., et al. J Biophotonics, 2012. 5(5-6):458-68; Garrett, N. L., et al. J Raman Spect, 2012. 43(5):681-688; Ahmad, S., et al. J Royal Soc Interface 2010. 7:S423-33; Uchegbu, I. F. Expert Opin Drug Deliv, 2006. 3(5):629-40; Qu, X., et al. Biomacromolecules, 2006. 7(12):3452-9 and Uchegbu, I. F., et al. Int J Pharm, 2001. 224:185-199). Doses of about 5 mg/kg are contemplated, with single or multiple doses, depending on the target tissue.

[1019] In one embodiment, particles/nanoparticles that can deliver RNA to a cancer cell to stop tumor growth developed by Dan Anderson's lab at MIT may be used/and or adapted to the CRISPR Cas system of the present invention. In particular, the Anderson lab developed fully automated, combinatorial systems for the synthesis, purification, characterization, and formulation of new biomaterials and nanoformulations. See, e.g., Alabi et al., Proc Natl Acad Sci USA. 2013 Aug. 6; 110(32):12881-6; Zhang et al., Adv Mater. 2013 Sep. 6; 25(33):4641-5; Jiang et al., Nano Lett. 2013 Mar. 13; 13(3):1059-64; Karagiannis et al., ACS Nano. 2012 Oct. 23; 6(10):8484-7; Whitehead et al., ACS Nano. 2012 Aug. 28; 6(8):6922-9 and Lee et al., Nat Nanotechnol. 2012 Jun. 3; 7(6):389-93.

[1020] The lipid particles developed by the Qiaobing Xu's lab at Tufts University may be used/adapted to the present delivery system for cancer therapy. See Wang et al., J. Control Release, 2017 Jan. 31. pii: S0168-3659(17)30038-X. doi: 10.1016/j.jconrel.2017.01.037. [Epub ahead of print]; Altmnoglu et al., Biomater Sci., 4(12):1773-80, Nov. 15, 2016; Wang et al., PNAS, 113(11):2868-73 Mar. 15, 2016; Wang et al., PloS One, 10(11): e0141860. doi: 10.1371/journal.pone.0141860. eCollection 2015, Nov. 3, 2015; Takeda et al., Neural Regen Res. 10(5):689-90, May 2015; Wang et al., Adv. Healthc Mater., 3(9):1398-403, September 2014; and Wang et al., Agnew Chem Int Ed Engl., 53(11):2893-8, Mar. 10, 2014.

[1021] US patent application 20110293703 relates to lipidoid compounds are also particularly useful in the administration of polynucleotides, which may be applied to deliver the CRISPR Cas system of the present invention. In one aspect, the aminoalcohol lipidoid compounds are combined with an agent to be delivered to a cell or a subject to form microparticles, nanoparticles, liposomes, or micelles. The agent to be delivered by the particles, liposomes, or micelles may be in the form of a gas, liquid, or solid, and the agent may be a polynucleotide, protein, peptide, or small molecule. The aminoalcohol lipidoid compounds may be combined with other aminoalcohol lipidoid compounds, polymers (synthetic or natural), surfactants, cholesterol, carbohydrates, proteins, lipids, etc. to form the particles. These particles may then optionally be combined with a pharmaceutical excipient to form a pharmaceutical composition.

[1022] US Patent Publication No. 20110293703 also provides methods of preparing the aminoalcohol lipidoid compounds. One or more equivalents of an amine are allowed to react with one or more equivalents of an epoxide-terminated compound under suitable conditions to form an aminoalcohol lipidoid compound of the present invention. In certain embodiments, all the amino groups of the amine are fully reacted with the epoxide-terminated compound to form tertiary amines. In other embodiments, all the amino groups of the amine are not fully reacted with the epoxide-terminated compound to form tertiary amines thereby resulting in primary or secondary amines in the aminoalcohol lipidoid compound. These primary or secondary amines are left as is or may be reacted with another electrophile such as a different epoxide-terminated compound. As will be appreciated by one skilled in the art, reacting an amine with less than excess of epoxide-terminated compound will result in a plurality of different aminoalcohol lipidoid compounds with various numbers of tails. Certain amines may be fully functionalized with two epoxide-derived compound tails while other molecules will not be completely functionalized with epoxide-derived compound tails. For example, a diamine or polyamine may include one, two, three, or four epoxide-derived compound tails off the various amino moieties of the molecule resulting in primary, secondary, and tertiary amines. In certain embodiments, all the amino groups are not fully functionalized. In certain embodiments, two of the same types of epoxide-terminated compounds are used. In other embodiments, two or more different epoxide-terminated compounds are used. The synthesis of the aminoalcohol lipidoid compounds is performed with or without solvent, and the synthesis may be performed at higher temperatures ranging from 30-100° C., preferably at approximately 50-90° C. The prepared aminoalcohol lipidoid compounds may be optionally purified. For example, the mixture of aminoalcohol lipidoid compounds may be purified to yield an aminoalcohol lipidoid compound with a particular number of epoxide-derived compound tails. Or the mixture may be purified to yield a particular stereo- or regioisomer. The aminoalcohol lipidoid compounds may also be alkylated using an alkyl halide (e.g., methyl iodide) or other alkylating agent, and/or they may be acylated.

[1023] US Patent Publication No. 20110293703 also provides libraries of aminoalcohol lipidoid compounds prepared by the inventive methods. These aminoalcohol lipidoid compounds may be prepared and/or screened using high-throughput techniques involving liquid handlers, robots, microtiter plates, computers, etc. In certain embodiments, the aminoalcohol lipidoid compounds are screened for their ability to transfect polynucleotides or other agents (e.g., proteins, peptides, small molecules) into the cell.

[1024] US Patent Publication No. 20130302401 relates to a class of poly(beta-amino alcohols) (PBAAs) has been prepared using combinatorial polymerization. The inventive PBAAs may be used in biotechnology and biomedical applications as coatings (such as coatings of films or multilayer films for medical devices or implants), additives, materials, excipients, non-biofouling agents, micropatterning agents, and cellular encapsulation agents. When used as surface coatings, these PBAAs elicited different levels of inflammation, both in vitro and in vivo, depending on their chemical structures. The large chemical diversity of this class of materials allowed us to identify polymer coatings that inhibit macrophage activation in vitro. Furthermore, these coatings reduce the recruitment of inflammatory cells, and reduce fibrosis, following the subcutaneous implantation of carboxylated polystyrene microparticles. These polymers may be used to form polyelectrolyte complex capsules for cell encapsulation. The invention may also have many other biological applications such as antimicrobial coatings, DNA or siRNA delivery, and stem cell tissue engineering. The teachings of US Patent Publication No. 20130302401 may be applied to the CRISPR Cas system of the present invention.

[1025] In another embodiment, lipid nanoparticles (LNPs) are contemplated. An antitransthyretin small interfering RNA has been encapsulated in lipid nanoparticles and delivered to humans (see, e.g., Coelho et al., N Engl J Med 2013; 369:819-29), and such a system may be adapted and applied to the CRISPR Cas system of the present invention. Doses of about 0.01 to about 1 mg per kg of body weight administered intravenously are contemplated. Medications to reduce the risk of infusion-related reactions are contemplated, such as dexamethasone, acetampinophen, diphenhydramine or cetirizine, and ranitidine are contemplated. Multiple doses of about 0.3 mg per kilogram every 4 weeks for five doses are also contemplated.

[1026] Zhu et al. (US20140348900) provides for a process for preparing liposomes, lipid discs, and other lipid nanoparticles using a multi-port manifold, wherein the lipid solution stream, containing an organic solvent, is mixed with two or more streams of aqueous solution (e.g., buffer). In some aspects, at least some of the streams of the lipid and aqueous solutions are not directly opposite of each other. Thus, the process does not require dilution of the organic solvent as an additional step. In some embodiments, one of the solutions may also contain an active pharmaceutical ingredient (API). This invention provides a robust process of liposome manufacturing with different lipid formulations and different payloads. Particle size, morphology, and the manufacturing scale can be controlled by altering the port size and number of the manifold ports, and by selecting the flow rate or flow velocity of the lipid and aqueous solutions.

[1027] Cullis et al. (US 20140328759) provides limit size lipid nanoparticles with a diameter from 10-100 nm, in particular comprising a lipid bilayer surrounding an aqueous core. Methods and apparatus for preparing such limit size lipid nanoparticles are also disclosed.

[1028] Manoharan et al. (US 20140308304) provides cationic lipids of formula (I)

[chemical structure]

[1029] or a salt thereof, wherein X is N or P; R′ is absent, hydrogen, or alkyl; with respect to R¹ and R², (i) R¹ and R² are each, independently, optionally substituted alkyl, alkenyl, alkynyl, cycloalkyl, cycloalkylalkyl, heterocycle or R¹⁰; (ii) R¹ and R², together with the nitrogen atom to which they are attached, form an optionally substituted heterocylic ring; or (iii) one of R¹ and R² is optionally substituted alkyl, alkenyl, alkynyl, cycloalkyl, cycloalkylalkyl, or heterocycle, and the other forms a 4-10 member heterocyclic ring or heteroaryl with (a) the adjacent nitrogen atom and (b) the (R)ₐ group adjacent to the nitrogen atom; each occurrence of R is, independently, —(CR³R⁴)—; each occurrence of R³ and R⁴ are, independently H, halogen, OH, alkyl, alkoxy, —NH.sub.2, alkylamino, or dialkylamino; or R³ and R⁴, together with the carbon atom to which they are directly attached, form a cycloalkyl group, wherein no more than three R groups in each chain attached to the atom X* are cycloalkyl; each occurrence of R.sup.10 is independently selected from PEG and polymers based on poly(oxazoline), poly(ethylene oxide), poly(vinyl alcohol), poly(glycerol), poly(N-vinylpyrrolidone), poly[N-(2-hydroxypropyl)methacrylamide] and poly(amino acid)s, wherein (i) the PEG or polymer is linear or branched, (ii) the PEG or polymer is polymerized by n subunits, (iii) n is a number-averaged degree of polymerization between 10 and 200 units, and (iv) wherein the compound of formula has at most two R¹⁰ groups; Q is absent or is —O—, —NH—, —S—, —C(O)O—, —OC(O)—, —C(O)N(R⁴)—, —N(R⁵)C(O)—, —S—S—, —OC(O)O—, —O—N.dbd.C(R⁵)—, —C(R⁵).dbd.N—O—, —OC(O)N(R⁵)—, —N(R⁵)C(O)N(R⁵)—, —N(R⁵)C(O)O—, —C(O)S—, —C(S)O— or —C(R⁵).dbd.N—O—C(O)—; Q¹ and Q² are each, independently, absent, —O—, —S—, —OC(O)—, —C(O)O—, —SC(O)—, —C(O)S—, —OC(S)—, —C(S)O—, —S—S—, —C(O)(NR⁵)—, —N(R⁵)C(O)—, —C(S)(NR⁵)—N(R⁵)C(O)—, —N(R⁵)C(O)N(R⁵)—, or —OC(O)O—; Q³ and Q⁴ are each, independently, H, —(CR³R⁴)—, aryl, or a cholesterol moiety; each occurrence of A¹, A², A³ and A⁴ is, independently, —(CR⁵R⁵—CR⁵.dbd.CR⁵)—; each occurrence of R⁵ is, independently, H or alkyl; M¹ and M² are each, independently, a biodegradable group (e.g., —OC(O)—, —C(O)O—, —SC(O)—, —C(O)S—, —OC(S)—, —C(S)O—, —S—S—, —C(R⁵).dbd.N—, —N.dbd.C(R⁵)—, —C(R⁵).dbd.N—O—, —O—N.dbd.C(R5)-, —C(O)(NR5)-, —N(R5)C(O)—, —C(S)(NR⁵)—, —N(R⁵)C(O)—, —N(R⁵)C(O)N(R⁵)—, —OC(O)O—, —OSi(R⁵).sub.2O-, —C(O)(CR³R⁴)C(O)O—, or —OC(O)(CR³R⁴)C(O)—); Z is absent, alkylene or —O—P(O)(OH)—O—; each - - - - - - attached to Z is an optional bond, such that when Z is absent, Q³ and Q⁴ are not directly covalently bound together; a is 1, 2, 3, 4, 5 or 6; b is 0, 1, 2, or 3; c, d, e, f, i, j, m, n, q and r are each, independently, 0, 1, 2, 3, 4, 5, 6, 7, 8, 9, or 10; g and h are each, independently, 0, 1 or 2; k and 1 are each, independently, 0 or 1, where at least one of k and 1 is 1; and o and p are each, independently, 0, 1 or 2, wherein Q³ and Q⁴ are each, independently, separated from the tertiary atom marked with an asterisk (X*) by a chain of 8 or more atoms. The cationic lipid can be used with other lipid components such as cholesterol and PEG-lipids to form lipid nanoparticles with oligonucleotides, to facilitate the cellular uptake and endosomal escape, and to knockdown target mRNA both in vitro and in vivo.

[1030] LNPs have been shown to be highly effective in delivering siRNAs to the liver (see, e.g., Tabernero et al., Cancer Discovery, April 2013, Vol. 3, No. 4, pages 363-470) and are therefore contemplated for delivering RNA encoding CRISPR Cas to the liver. A dosage of about four doses of 6 mg/kg of the LNP every two weeks may be contemplated. Tabernero et al. demonstrated that tumor regression was observed after the first 2 cycles of LNPs dosed at 0.7 mg/kg, and by the end of 6 cycles the patient had achieved a partial response with complete regression of the lymph node metastasis and substantial shrinkage of the liver tumors. A complete response was obtained after 40 doses in this patient, who has remained in remission and completed treatment after receiving doses over 26 months. Two patients with RCC and extrahepatic sites of disease including kidney, lung, and lymph nodes that were progressing following prior therapy with VEGF pathway inhibitors had stable disease at all sites for approximately 8 to 12 months, and a patient with PNET and liver metastases continued on the extension study for 18 months (36 doses) with stable disease.

[1031] However, the charge of the LNP must be taken into consideration. As cationic lipids combined with negatively charged lipids to induce nonbilayer structures that facilitate intracellular delivery. Because charged LNPs are rapidly cleared from circulation following intravenous injection, ionizable cationic lipids with pKa values below 7 were developed (see, e.g., Rosin et al, Molecular Therapy, vol. 19, no. 12, pages 1286-2200, December 2011). Negatively charged polymers such as RNA may be loaded into LNPs at low pH values (e.g., pH 4) where the ionizable lipids display a positive charge. However, at physiological pH values, the LNPs exhibit a low surface charge compatible with longer circulation times. Four species of ionizable cationic lipids have been focused upon, namely 1,2-dilineoyl-3-dimethylammonium-propane (DLinDAP), 1,2-dilinoleyloxy-3-N,N-dimethylaminopropane (DLinDMA), 1,2-dilinoleyloxy-keto-N,N-dimethyl-3-aminopropane (DLinKDMA), and 1,2-dilinoleyl-4-(2-dimethylaminoethyl)-[1,3]-dioxolane (DLinKC2-DMA). It has been shown that LNP siRNA systems containing these lipids exhibit remarkably different gene silencing properties in hepatocytes in vivo, with potencies varying according to the series DLinKC2-DMA>DLinKDMA>DLinDMA>>DLinDAP employing a Factor VII gene silencing model (see, e.g., Rosin et al, Molecular Therapy, vol. 19, no. 12, pages 1286-2200, December 2011). A dosage of 1 μg/ml of LNP or CRISPR-Cas RNA in or associated with the LNP may be contemplated, especially for a formulation containing DLinKC2-DMA.

[1032] Preparation of LNPs and CRISPR Cas encapsulation may be used/and or adapted from Rosin et al, Molecular Therapy, vol. 19, no. 12, pages 1286-2200, December 2011). The cationic lipids 1,2-dilineoyl-3-dimethylammonium-propane (DLinDAP), 1,2-dilinoleyloxy-3-N,N-dimethylaminopropane (DLinDMA), 1,2-dilinoleyloxyketo-N,N-dimethyl-3-aminopropane (DLinK-DMA), 1,2-dilinoleyl-4-(2-dimethylaminoethyl)-[1,3]-dioxolane (DLinKC2-DMA), (3-o-[2″-(methoxypolyethyleneglycol 2000) succinoyl]-1,2-dimyristoyl-sn-glycol (PEG-S-DMG), and R-3-[(ω-methoxy-poly(ethylene glycol)2000) carbamoyl]-1,2-dimyristyloxlpropyl-3-amine (PEG-C-DOMG) may be provided by Tekmira Pharmaceuticals (Vancouver, Canada) or synthesized. Cholesterol may be purchased from Sigma (St Louis, Mo.). The specific CRISPR Cas RNA may be encapsulated in LNPs containing DLinDAP, DLinDMA, DLinK-DMA, and DLinKC2-DMA (cationic lipid:DSPC:CHOL:PEGS-DMG or PEG-C-DOMG at 40:10:40:10 molar ratios). When required, 0.2% SP-DiOC18 (Invitrogen, Burlington, Canada) may be incorporated to assess cellular uptake, intracellular delivery, and biodistribution. Encapsulation may be performed by dissolving lipid mixtures comprised of cationic lipid:DSPC:cholesterol:PEG-c-DOMG (40:10:40:10 molar ratio) in ethanol to a final lipid concentration of 10 mmol/l. This ethanol solution of lipid may be added drop-wise to 50 mmol/l citrate, pH 4.0 to form multilamellar vesicles to produce a final concentration of 30% ethanol vol/vol. Large unilamellar vesicles may be formed following extrusion of multilamellar vesicles through two stacked 80 nm Nuclepore polycarbonate filters using the Extruder (Northern Lipids, Vancouver, Canada). Encapsulation may be achieved by adding RNA dissolved at 2 mg/ml in 50 mmol/l citrate, pH 4.0 containing 30% ethanol vol/vol drop-wise to extruded preformed large unilamellar vesicles and incubation at 31° C. for 30 minutes with constant mixing to a final RNA/lipid weight ratio of 0.06/1 wt/wt. Removal of ethanol and neutralization of formulation buffer were performed by dialysis against phosphate-buffered saline (PBS), pH 7.4 for 16 hours using Spectra/Por 2 regenerated cellulose dialysis membranes. Nanoparticle size distribution may be determined by dynamic light scattering using a NICOMP 370 particle sizer, the vesicle/intensity modes, and Gaussian fitting (Nicomp Particle Sizing, Santa Barbara, Calif.). The particle size for all three LNP systems may be ˜70 nm in diameter. RNA encapsulation efficiency may be determined by removal of free RNA using VivaPureD MiniH columns (Sartorius Stedim Biotech) from samples collected before and after dialysis. The encapsulated RNA may be extracted from the eluted nanoparticles and quantified at 260 nm. RNA to lipid ratio was determined by measurement of cholesterol content in vesicles using the Cholesterol E enzymatic assay from Wako Chemicals USA (Richmond, Va.). In conjunction with the herein discussion of LNPs and PEG lipids, PEGylated liposomes or LNPs are likewise suitable for delivery of a CRISPR-Cas system or components thereof.

[1033] Preparation of large LNPs may be used/and or adapted from Rosin et al, Molecular Therapy, vol. 19, no. 12, pages 1286-2200, December 2011. A lipid premix solution (20.4 mg/ml total lipid concentration) may be prepared in ethanol containing DLinKC2-DMA, DSPC, and cholesterol at 50:10:38.5 molar ratios. Sodium acetate may be added to the lipid premix at a molar ratio of 0.75:1 (sodium acetate:DLinKC2-DMA). The lipids may be subsequently hydrated by combining the mixture with 1.85 volumes of citrate buffer (10 mmol/l, pH 3.0) with vigorous stirring, resulting in spontaneous liposome formation in aqueous buffer containing 35% ethanol. The liposome solution may be incubated at 37° C. to allow for time-dependent increase in particle size. Aliquots may be removed at various times during incubation to investigate changes in liposome size by dynamic light scattering (Zetasizer Nano Z S, Malvern Instruments, Worcestershire, UK). Once the desired particle size is achieved, an aqueous PEG lipid solution (stock=10 mg/ml PEG-DMG in 35% (vol/vol) ethanol) may be added to the liposome mixture to yield a final PEG molar concentration of 3.5% of total lipid. Upon addition of PEG-lipids, the liposomes should their size, effectively quenching further growth. RNA may then be added to the empty liposomes at an RNA to total lipid ratio of approximately 1:10 (wt:wt), followed by incubation for 30 minutes at 37° C. to form loaded LNPs. The mixture may be subsequently dialyzed overnight in PBS and filtered with a 0.45-am syringe filter.

[1034] Preassembled recombinant CRISPR-Cas complexes comprising Cas and crRNA may be transfected, for example by electroporation, resulting in high mutation rates and absence of detectable off-target mutations. Hur, J. K. et al, Targeted mutagenesis in mice by electroporation of Cas ribonucleoproteins, Nat Biotechnol. 2016 Jun. 6. doi: 10.1038/nbt.3596. [Epub ahead of print]

[1035] In terms of local delivery to the brain, this can be achieved in various ways. For instance, material can be delivered intrastriatally e.g. by injection. Injection can be performed stereotactically via a craniotomy.

[1036] Enhancing NHEJ or HR efficiency is also helpful for delivery. It is preferred that NHEJ efficiency is enhanced by co-expressing end-processing enzymes such as Trex2 (Dumitrache et al. Genetics. 2011 August; 188(4): 787-797). It is preferred that HR efficiency is increased by transiently inhibiting NHEJ machineries such as Ku70 and Ku86. HR efficiency can also be increased by co-expressing prokaryotic or eukaryotic homologous recombination enzymes such as RecBCD, RecA.

[1037] In some embodiments, sugar-based particles may be used, for example GalNAc, as described herein and with reference to WO2014118272 (incorporated herein by reference) and Nair, J K et al., 2014, Journal of the American Chemical Society 136 (49), 16958-16961) and the teaching herein, especially in respect of delivery applies to all particles unless otherwise apparent. This may be considered to be a sugar-based particle and further details on other particle delivery systems and/or formulations are provided herein. GalNAc can therefore be considered to be a particle in the sense of the other particles described herein, such that general uses and other considerations, for instance delivery of said particles, apply to GalNAc particles as well. A solution-phase conjugation strategy may for example be used to attach triantennary GalNAc clusters (mol. wt. ˜2000) activated as PFP (pentafluorophenyl) esters onto 5′-hexylamino modified oligonucleotides (5′-HA ASOs, mol. wt. ˜8000 Da; Ostergaard et al., Bioconjugate Chem., 2015, 26 (8), pp 1451-1455). Similarly, poly(acrylate) polymers have been described for in vivo nucleic acid delivery (see WO2013158141 incorporated herein by reference). In further alternative embodiments, pre-mixing CRISPR nanoparticles (or protein complexes) with naturally occurring serum proteins may be used in order to improve delivery (Akinc A et al, 2010, Molecular Therapy vol. 18 no. 7, 1357-1364).

[1038] Additional nanoparticle configurations are also contemplated In another embodiment, Cas9 protein and sgRNA can be delivered into cells using “CRISPR-delivery particles,” (CriPs), composed of nano-size complexes of Cas9 protein and sgRNA that are coated with an amphipathic peptide called Endo-Porter (EP) an amphipathic α-helical peptide composed of leucine and histidine residues that mediates entry into cells. See, e.g. Shen et al., “CRISPR-delivery particles targeting nuclear receptor-interacting protein 1 (Nrip1) in adipose cells to enhance energy expenditure” J Biol Chem. 2018 Nov. 2; 293(44):17291-17305. In another embodiment, Cas9 plasmids and synthesized sgRNAs can be delivered into cells encapsulated in PEGylated nanoparticles (named P-HNPs) based on the cationic α-helical polypeptide poly(γ-4-((2-(piperidin-1-yl)ethyl)aminomethyl)benzyl-1-glutamate). See, e.g. Wang et al., “Nonviral gene editing via CRISPR/Cas9 delivery by membrane-disruptive and endosomolytic helical polypeptide” Proc Natl Acad Sci USA. 2018 May 8; 115(19): 4903-4908. In another embodiment, a CRISPR-Cas9 plasmid can be incorporated into a self assembled nanoparticle. The plasmid can be complexed with protamine sulfate and the resulting complex decorated by a multi-functional outer layer composed of an endosomolytic peptide (KALA) and aptamer AS1411 incorporated carboxymethyl chitosan. See, e.g. Liu et al., “Tumor targeted genome editing mediated by a multi-functional gene vector for regulating cell behaviors.” J Control Release. 2018 Dec. 10; 291:90-98. In another embodiment, spCas9 and sgRNA RNP complexes can be delivered via a vesicle decorated with the fusogenic glycoprotein of the vesicular stomatitis virus (VSV-G). See, e.g. “VSV-G-Enveloped Vesicles for Traceless Delivery of CRISPR-Cas9” Montagna et al., Sci Rep. 2018 Nov. 2; 8(1):16304. In another embodiment, Cas9 RNP can be delivered by encapsulation in a nanoscale zeolitic imidazole framework (ZIF), in which enhanced endosomal escape is promoted by the protonated imidazole moieties. See, e.g. Alsaiari et al., “Endosomal Escape and Delivery of CRISPR/Cas9 Genome Editing Machinery Enabled by Nanoscale Zeolitic Imidazolate Framework” J Am Chem Soc. 2018 Jan. 10; 140(1):143-146.

[1039] Also contemplated are filtration-based systems. In one embodiment, Cas9 and sgRNA RNP complexes can be delivered into patient-derived hematopoietic stem and progenitor cells (HSPCs) ex vivo using TRansmembrane Internalization Assisted by Membrane Filtration (TRIAMF), a method to deliver RNPs into HSPCs by passing a RNP and cell mixture through a filter membrane. See, e.g. Yen et al., “TRIAMF: A New Method for Delivery of Cas9 Ribonucleoprotein Complex to Human Hematopoietic Stem Cells” Sci Rep. 2018 Nov. 2; 8(1):16304.

### Nanoclews

[1040] Further, the CRISPR system may be delivered using nanoclews, for example as described in Sun W et al, Cocoon-like self-degradable DNA nanoclew for anticancer drug delivery., J Am Chem Soc. 2014 Oct. 22; 136(42):14722-5. doi: 10.1021/ja5088024. Epub 2014 Oct. 13.; or in Sun W et al, Self-Assembled DNA Nanoclews for the Efficient Delivery of CRISPR-Cas9 for Genome Editing., Angew Chem Int Ed Engl. 2015 Oct. 5; 54(41):12029-33. doi: 10.1002/anie.201506030. Epub 2015 Aug. 27.

### LNP

[1041] In some embodiments, delivery is by encapsulation of the Cas protein or mRNA form in a lipid particle such as an LNP. In some embodiments, therefore, lipid nanoparticles (LNPs) are contemplated. An antitransthyretin small interfering RNA has been encapsulated in lipid nanoparticles and delivered to humans (see, e.g., Coelho et al., N Engl J Med 2013; 369:819-29), and such a system may be adapted and applied to the CRISPR Cas system of the present invention. Doses of about 0.01 to about 1 mg per kg of body weight administered intravenously are contemplated. Medications to reduce the risk of infusion-related reactions are contemplated, such as dexamethasone, acetampinophen, diphenhydramine or cetirizine, and ranitidine are contemplated. Multiple doses of about 0.3 mg per kilogram every 4 weeks for five doses are also contemplated.

[1042] LNPs have been shown to be highly effective in delivering siRNAs to the liver (see, e.g., Tabernero et al., Cancer Discovery, April 2013, Vol. 3, No. 4, pages 363-470) and are therefore contemplated for delivering RNA encoding CRISPR Cas to the liver. A dosage of about four doses of 6 mg/kg of the LNP every two weeks may be contemplated. Tabernero et al. demonstrated that tumor regression was observed after the first 2 cycles of LNPs dosed at 0.7 mg/kg, and by the end of 6 cycles the patient had achieved a partial response with complete regression of the lymph node metastasis and substantial shrinkage of the liver tumors. A complete response was obtained after 40 doses in this patient, who has remained in remission and completed treatment after receiving doses over 26 months. Two patients with RCC and extrahepatic sites of disease including kidney, lung, and lymph nodes that were progressing following prior therapy with VEGF pathway inhibitors had stable disease at all sites for approximately 8 to 12 months, and a patient with PNET and liver metastases continued on the extension study for 18 months (36 doses) with stable disease.

[1043] However, the charge of the LNP must be taken into consideration. As cationic lipids combined with negatively charged lipids to induce nonbilayer structures that facilitate intracellular delivery. Because charged LNPs are rapidly cleared from circulation following intravenous injection, ionizable cationic lipids with pKa values below 7 were developed (see, e.g., Rosin et al, Molecular Therapy, vol. 19, no. 12, pages 1286-2200, December 2011). Negatively charged polymers such as RNA may be loaded into LNPs at low pH values (e.g., pH 4) where the ionizable lipids display a positive charge. However, at physiological pH values, the LNPs exhibit a low surface charge compatible with longer circulation times. Four species of ionizable cationic lipids have been focused upon, namely 1,2-dilineoyl-3-dimethylammonium-propane (DLinDAP), 1,2-dilinoleyloxy-3-N,N-dimethylaminopropane (DLinDMA), 1,2-dilinoleyloxy-keto-N,N-dimethyl-3-aminopropane (DLinKDMA), and 1,2-dilinoleyl-4-(2-dimethylaminoethyl)-[1,3]-dioxolane (DLinKC2-DMA). It has been shown that LNP siRNA systems containing these lipids exhibit remarkably different gene silencing properties in hepatocytes in vivo, with potencies varying according to the series DLinKC2-DMA>DLinKDMA>DLinDMA>>DLinDAP employing a Factor VII gene silencing model (see, e.g., Rosin et al, Molecular Therapy, vol. 19, no. 12, pages 1286-2200, December 2011). A dosage of 1 μg/ml of LNP or CRISPR-Cas RNA in or associated with the LNP may be contemplated, especially for a formulation containing DLinKC2-DMA.

[1044] Preparation of LNPs and CRISPR Cas encapsulation may be used/and or adapted from Rosin et al, Molecular Therapy, vol. 19, no. 12, pages 1286-2200, December 2011). The cationic lipids 1,2-dilineoyl-3-dimethylammonium-propane (DLinDAP), 1,2-dilinoleyloxy-3-N,N-dimethylaminopropane (DLinDMA), 1,2-dilinoleyloxyketo-N,N-dimethyl-3-aminopropane (DLinK-DMA), 1,2-dilinoleyl-4-(2-dimethylaminoethyl)-[1,3]-dioxolane (DLinKC2-DMA), (3-o-[2″-(methoxypolyethyleneglycol 2000) succinoyl]-1,2-dimyristoyl-sn-glycol (PEG-S-DMG), and R-3-[(co-methoxy-poly(ethylene glycol)2000) carbamoyl]-1,2-dimyristyloxlpropyl-3-amine (PEG-C-DOMG) may be provided by Tekmira Pharmaceuticals (Vancouver, Canada) or synthesized. Cholesterol may be purchased from Sigma (St Louis, Mo.). The specific CRISPR Cas RNA may be encapsulated in LNPs containing DLinDAP, DLinDMA, DLinK-DMA, and DLinKC2-DMA (cationic lipid:DSPC:CHOL:PEGS-DMG or PEG-C-DOMG at 40:10:40:10 molar ratios). When required, 0.2% SP-DiOC18 (Invitrogen, Burlington, Canada) may be incorporated to assess cellular uptake, intracellular delivery, and biodistribution. Encapsulation may be performed by dissolving lipid mixtures comprised of cationic lipid:DSPC:cholesterol:PEG-c-DOMG (40:10:40:10 molar ratio) in ethanol to a final lipid concentration of 10 mmol/l. This ethanol solution of lipid may be added drop-wise to 50 mmol/l citrate, pH 4.0 to form multilamellar vesicles to produce a final concentration of 30% ethanol vol/vol. Large unilamellar vesicles may be formed following extrusion of multilamellar vesicles through two stacked 80 nm Nuclepore polycarbonate filters using the Extruder (Northern Lipids, Vancouver, Canada). Encapsulation may be achieved by adding RNA dissolved at 2 mg/ml in 50 mmol/l citrate, pH 4.0 containing 30% ethanol vol/vol drop-wise to extruded preformed large unilamellar vesicles and incubation at 31° C. for 30 minutes with constant mixing to a final RNA/lipid weight ratio of 0.06/1 wt/wt. Removal of ethanol and neutralization of formulation buffer were performed by dialysis against phosphate-buffered saline (PBS), pH 7.4 for 16 hours using Spectra/Por 2 regenerated cellulose dialysis membranes. Nanoparticle size distribution may be determined by dynamic light scattering using a NICOMP 370 particle sizer, the vesicle/intensity modes, and Gaussian fitting (Nicomp Particle Sizing, Santa Barbara, Calif.). The particle size for all three LNP systems may be ˜70 nm in diameter. RNA encapsulation efficiency may be determined by removal of free RNA using VivaPureD MiniH columns (Sartorius Stedim Biotech) from samples collected before and after dialysis. The encapsulated RNA may be extracted from the eluted nanoparticles and quantified at 260 nm. RNA to lipid ratio was determined by measurement of cholesterol content in vesicles using the Cholesterol E enzymatic assay from Wako Chemicals USA (Richmond, Va.). In conjunction with the herein discussion of LNPs and PEG lipids, PEGylated liposomes or LNPs are likewise suitable for delivery of a CRISPR-Cas system or components thereof.

[1045] A lipid premix solution (20.4 mg/ml total lipid concentration) may be prepared in ethanol containing DLinKC2-DMA, DSPC, and cholesterol at 50:10:38.5 molar ratios. Sodium acetate may be added to the lipid premix at a molar ratio of 0.75:1 (sodium acetate:DLinKC2-DMA). The lipids may be subsequently hydrated by combining the mixture with 1.85 volumes of citrate buffer (10 mmol/l, pH 3.0) with vigorous stirring, resulting in spontaneous liposome formation in aqueous buffer containing 35% ethanol. The liposome solution may be incubated at 37° C. to allow for time-dependent increase in particle size. Aliquots may be removed at various times during incubation to investigate changes in liposome size by dynamic light scattering (Zetasizer Nano ZS, Malvern Instruments, Worcestershire, UK). Once the desired particle size is achieved, an aqueous PEG lipid solution (stock=10 mg/ml PEG-DMG in 35% (vol/vol) ethanol) may be added to the liposome mixture to yield a final PEG molar concentration of 3.5% of total lipid. Upon addition of PEG-lipids, the liposomes should their size, effectively quenching further growth. RNA may then be added to the empty liposomes at an RNA to total lipid ratio of approximately 1:10 (wt:wt), followed by incubation for 30 minutes at 37° C. to form loaded LNPs. The mixture may be subsequently dialyzed overnight in PBS and filtered with a 0.45-μm syringe filter.

[1046] Spherical Nucleic Acid (SNA™) constructs and other nanoparticles (particularly gold nanoparticles) are also contemplated as a means to delivery CRISPR-Cas system to intended targets. Significant data show that AuraSense Therapeutics' Spherical Nucleic Acid (SNA™) constructs, based upon nucleic acid-functionalized gold nanoparticles, are useful.

[1047] Literature that may be employed in conjunction with herein teachings include: Cutler et al., J. Am. Chem. Soc. 2011 133:9254-9257, Hao et al., Small. 2011 7:3158-3162, Zhang et al., ACS Nano. 2011 5:6962-6970, Cutler et al., J. Am. Chem. Soc. 2012 134:1376-1391, Young et al., Nano Lett. 2012 12:3867-71, Zheng et al., Proc. Natl. Acad. Sci. USA. 2012 109:11975-80, Mirkin, Nanomedicine 2012 7:635-638 Zhang et al., J. Am. Chem. Soc. 2012 134:16488-1691, Weintraub, Nature 2013 495:S14-S16, Choi et al., Proc. Natl. Acad. Sci. USA. 2013 110(19):7625-7630, Jensen et al., Sci. Transl. Med. 5, 209ra152 (2013) and Mirkin, et al., Small, 10:186-192.

[1048] Self-assembling nanoparticles with RNA may be constructed with polyethyleneimine (PEI) that is PEGylated with an Arg-Gly-Asp (RGD) peptide ligand attached at the distal end of the polyethylene glycol (PEG). This system has been used, for example, as a means to target tumor neovasculature expressing integrins and deliver siRNA inhibiting vascular endothelial growth factor receptor-2 (VEGF R2) expression and thereby achieve tumor angiogenesis (see, e.g., Schiffelers et al., Nucleic Acids Research, 2004, Vol. 32, No. 19). Nanoplexes may be prepared by mixing equal volumes of aqueous solutions of cationic polymer and nucleic acid to give a net molar excess of ionizable nitrogen (polymer) to phosphate (nucleic acid) over the range of 2 to 6. The electrostatic interactions between cationic polymers and nucleic acid resulted in the formation of polyplexes with average particle size distribution of about 100 nm, hence referred to here as nanoplexes. A dosage of about 100 to 200 mg of CRISPR Cas is envisioned for delivery in the self-assembling nanoparticles of Schiffelers et al.

[1049] The nanoplexes of Bartlett et al. (PNAS, Sep. 25, 2007, vol. 104, no. 39) may also be applied to the present invention. The nanoplexes of Bartlett et al. are prepared by mixing equal volumes of aqueous solutions of cationic polymer and nucleic acid to give a net molar excess of ionizable nitrogen (polymer) to phosphate (nucleic acid) over the range of 2 to 6. The electrostatic interactions between cationic polymers and nucleic acid resulted in the formation of polyplexes with average particle size distribution of about 100 nm, hence referred to here as nanoplexes. The DOTA-siRNA of Bartlett et al. was synthesized as follows: 1,4,7,10-tetraazacyclododecane-1,4,7,10-tetraacetic acid mono(N-hydroxysuccinimide ester) (DOTA-NHSester) was ordered from Macrocyclics (Dallas, Tex.). The amine modified RNA sense strand with a 100-fold molar excess of DOTA-NHS-ester in carbonate buffer (pH 9) was added to a microcentrifuge tube. The contents were reacted by stirring for 4 h at room temperature. The DOTA-RNAsense conjugate was ethanol-precipitated, resuspended in water, and annealed to the unmodified antisense strand to yield DOTA-siRNA. All liquids were pretreated with Chelex-100 (Bio-Rad, Hercules, Calif.) to remove trace metal contaminants. Tf-targeted and nontargeted siRNA nanoparticles may be formed by using cyclodextrin-containing polycations. Typically, nanoparticles were formed in water at a charge ratio of 3 (+/−) and an siRNA concentration of 0.5 g/liter. One percent of the adamantane-PEG molecules on the surface of the targeted nanoparticles were modified with Tf (adamantane-PEG-Tf). The nanoparticles were suspended in a 5% (wt/vol) glucose carrier solution for injection.

[1050] Davis et al. (Nature, Vol 464, 15 Apr. 2010) conducts a RNA clinical trial that uses a targeted nanoparticle-delivery system (clinical trial registration number NCT00689065). Patients with solid cancers refractory to standard-of-care therapies are administered doses of targeted nanoparticles on days 1, 3, 8 and 10 of a 21-day cycle by a 30-min intravenous infusion. The nanoparticles consist of a synthetic delivery system containing: (1) a linear, cyclodextrin-based polymer (CDP), (2) a human transferrin protein (TF) targeting ligand displayed on the exterior of the nanoparticle to engage TF receptors (TFR) on the surface of the cancer cells, (3) a hydrophilic polymer (polyethylene glycol (PEG) used to promote nanoparticle stability in biological fluids), and (4) siRNA designed to reduce the expression of the RRM2 (sequence used in the clinic was previously denoted siR2B+5). The TFR has long been known to be upregulated in malignant cells, and RRM2 is an established anti-cancer target. These nanoparticles (clinical version denoted as CALAA-01) have been shown to be well tolerated in multi-dosing studies in non-human primates. Although a single patient with chronic myeloid leukaemia has been administered siRNA by liposomal delivery, Davis et al.'s clinical trial is the initial human trial to systemically deliver siRNA with a targeted delivery system and to treat patients with solid cancer. To ascertain whether the targeted delivery system can provide effective delivery of functional siRNA to human tumors, Davis et al. investigated biopsies from three patients from three different dosing cohorts; patients A, B and C, all of whom had metastatic melanoma and received CALAA-01 doses of 18, 24 and 30 mg m-2 siRNA, respectively. Similar doses may also be contemplated for the CRISPR Cas system of the present invention. The delivery of the invention may be achieved with nanoparticles containing a linear, cyclodextrin-based polymer (CDP), a human transferrin protein (TF) targeting ligand displayed on the exterior of the nanoparticle to engage TF receptors (TFR) on the surface of the cancer cells and/or a hydrophilic polymer (for example, polyethylene glycol (PEG) used to promote nanoparticle stability in biological fluids).

[1051] U.S. Pat. No. 8,709,843, incorporated herein by reference, provides a drug delivery system for targeted delivery of therapeutic agent-containing particles to tissues, cells, and intracellular compartments. The invention provides targeted particles comprising comprising polymer conjugated to a surfactant, hydrophilic polymer or lipid.

[1052] U.S. Pat. No. 6,007,845, incorporated herein by reference, provides particles which have a core of a multiblock copolymer formed by covalently linking a multifunctional compound with one or more hydrophobic polymers and one or more hydrophilic polymers, and contain a biologically active material.

[1053] U.S. Pat. No. 5,855,913, incorporated herein by reference, provides a particulate composition having aerodynamically light particles having a tap density of less than 0.4 g/cm3 with a mean diameter of between 5 μm and 30 i m, incorporating a surfactant on the surface thereof for drug delivery to the pulmonary system.

[1054] U.S. Pat. No. 5,985,309, incorporated herein by reference, provides particles incorporating a surfactant and/or a hydrophilic or hydrophobic complex of a positively or negatively charged therapeutic or diagnostic agent and a charged molecule of opposite charge for delivery to the pulmonary system.

[1055] U.S. Pat. No. 5,543,158, incorporated herein by reference, provides biodegradable injectable particles having a biodegradable solid core containing a biologically active material and poly(alkylene glycol) moieties on the surface.

[1056] WO2012135025 (also published as US20120251560), incorporated herein by reference, describes conjugated polyethyleneimine (PEI) polymers and conjugated aza-macrocycles (collectively referred to as “conjugated lipomer” or “lipomers”). In certain embodiments, it can envisioned that such conjugated lipomers can be used in the context of the CRISPR-Cas system to achieve in vitro, ex vivo and in vivo genomic perturbations to modify gene expression, including modulation of protein expression.

[1057] In one embodiment, the nanoparticle may be epoxide-modified lipid-polymer, advantageously 7C1 (see, e.g., James E. Dahlman and Carmen Barnes et al. Nature Nanotechnology (2014) published online 11 May 2014, doi:10.1038/nnano.2014.84). C71 was synthesized by reacting C15 epoxide-terminated lipids with PEI600 at a 14:1 molar ratio, and was formulated with C14PEG2000 to produce nanoparticles (diameter between 35 and 60 nm) that were stable in PBS solution for at least 40 days.

[1058] An epoxide-modified lipid-polymer may be utilized to deliver the CRISPR-Cas system of the present invention to pulmonary, cardiovascular or renal cells, however, one of skill in the art may adapt the system to deliver to other target organs. Dosage ranging from about 0.05 to about 0.6 mg/kg are envisioned. Dosages over several days or weeks are also envisioned, with a total dosage of about 2 mg/kg.

[1059] In some embodiments, the LNP for diverting the RNA molecules is prepared by methods known in the art, such as those described in, for example, WO 2005/105152 (PCT/EP2005/004920), WO 2006/069782 (PCT/EP2005/014074), WO 2007/121947 (PCT/EP2007/003496), and WO 2015/082080 (PCT/EP2014/003274), which are herein incorporated by reference. LNPs aimed specifically at the enhanced and improved delivery of siRNA into mammalian cells are described in, for example, Aleku et al., Cancer Res., 68(23): 9788-98 (Dec. 1, 2008), Strumberg et al., Int. J. Clin. Pharmacol. Ther., 50(1): 76-8 (January 2012), Schultheis et al., J. Clin. Oncol., 32(36): 4141-48 (Dec. 20, 2014), and Fehring et al., Mol. Ther., 22(4): 811-20 (Apr. 22, 2014), which are herein incorporated by reference and may be applied to the present technology.

[1060] In some embodiments, the LNP includes any LNP disclosed in WO 2005/105152 (PCT/EP2005/004920), WO 2006/069782 (PCT/EP2005/014074), WO 2007/121947 (PCT/EP2007/003496), and WO 2015/082080 (PCT/EP2014/003274).

[1061] In some embodiments, the LNP includes at least one lipid having Formula I:

[chemical structure]

[1062] wherein R1 and R2 are each and independently selected from the group comprising alkyl, n is any integer between 1 and 4, and R3 is an acyl selected from the group comprising lysyl, ornithyl, 2,4-diaminobutyryl, histidyl and an acyl moiety according to Formula II:

[chemical structure]

[1063] wherein m is any integer from 1 to 3 and Y⁻ is a pharmaceutically acceptable anion. In some embodiments, a lipid according to Formula I includes at least two asymmetric C atoms. In some embodiments, enantiomers of Formula I include, but are not limited to, R-R; S-S; R-S and S-R enantiomer.

[1064] In some embodiments, R1 is lauryl and R2 is myristyl. In another embodiment, R1 is palmityl and R2 is oleyl. In some embodiments, m is 1 or 2. In some embodiments, Y− is selected from halogenids, acetate or trifluoroacetate.

[1065] In some embodiments, the LNP comprises one or more lipids select from:

[1066] β-arginyl-2,3-diamino propionic acid-N-palmityl-N-oleyl-amide trihydrochloride (Formula III):

[chemical structure]

[1067] β-arginyl-2,3-diamino propionic acid-N-lauryl-N-myristyl-amide trihydrochloride (Formula IV):

[chemical structure]

and

[1068] ε-arginyl-lysine-N-lauryl-N-myristyl-amide trihydrochloride (Formula V):

[chemical structure]

[1069] In some embodiments, the LNP also includes a constituent. By way of example, but not by way of limitation, in some embodiments, the constituent is selected from peptides, proteins, oligonucleotides, polynucleotides, nucleic acids, or a combination thereof. In some embodiments, the constituent is an antibody, e.g., a monoclonal antibody. In some embodiments, the constituent is a nucleic acid selected from, e.g., ribozymes, aptamers, spiegelmers, DNA, RNA, PNA, LNA, or a combination thereof. In some embodiments, the nucleic acid is gRNA and/or mRNA.

[1070] In some embodiments, the constituent of the LNP comprises an mRNA encoding a CRIPSR effector protein. In some embodiments, the constituent of the LNP comprises an mRNA encoding a Type-II, Type-V, or Type-VI CRIPSR effector protein. In some embodiments, the constituent of the LNP comprises an mRNA encoding an RNA-guided DNA binding protein. In some embodiments, the constituent of the LNP comprises an mRNA encoding an RNA-guided RNA binding protein.

[1071] In some embodiments, the constituent of the LNP further comprises one or more guide RNA. In some embodiments, the LNP is configured to deliver the aforementioned mRNA and guide RNA to vascular endothelium. In some embodiments, the LNP is configured to deliver the aforementioned mRNA and guide RNA to pulmonary endothelium. In some embodiments, the LNP is configured to deliver the aforementioned mRNA and guide RNA to liver. In some embodiments, the LNP is configured to deliver the aforementioned mRNA and guide RNA to lung. In some embodiments, the LNP is configured to deliver the aforementioned mRNA and guide RNA to hearts. In some embodiments, the LNP is configured to deliver the aforementioned mRNA and guide RNA to spleen. In some embodiments, the LNP is configured to deliver the aforementioned mRNA and guide RNA to kidney. In some embodiments, the LNP is configured to deliver the aforementioned mRNA and guide RNA to pancrea. In some embodiments, the LNP is configured to deliver the aforementioned mRNA and guide RNA to brain. In some embodiments, the LNP is configured to deliver the aforementioned mRNA and guide RNA to macrophages.

[1072] In some embodiments, the LNP also includes at least one helper lipid. In some embodiments, the helper lipid is selected from phospholipids and steroids. In some embodiments, the phospholipids are di- and/or monoester of the phosphoric acid. In some embodiments, the phospholipids are phosphoglycerides and/or sphingolipids. In some embodiments, the steroids are naturally occurring and/or synthetic compounds based on the partially hydrogenated cyclopenta[a]phenanthrene. In some embodiments, the steroids contain 21 to 30 C atoms. In some embodiments, the steroid is cholesterol. In some embodiments, the helper lipid is selected from 1,2-diphytanoyl-sn-glycero-3-phosphoethanolamine (DPhyPE), ceramide, and 1,2-dioleylsn-glycero-3-phosphoethanolamine (DOPE).

[1073] In some embodiments, the at least one helper lipid comprises a moiety selected from the group comprising a PEG moiety, a HEG moiety, a polyhydroxyethyl starch (polyHES) moiety and a polypropylene moiety. In some embodiments, the moiety has a molecule weight between about 500 to 10,000 Da or between about 2,000 to 5,000 Da. In some embodiments, the PEG moiety is selected from 1,2-distearoyl-sn-glycero-3 phosphoethanolamine, 1,2-dialkyl-sn-glycero-3-phosphoethanolamine, and Ceramide-PEG. In some embodiments, the PEG moiety has a molecular weight between about 500 to 10,000 Da or between about 2,000 to 5,000 Da. In some embodiments, the PEG moiety has a molecular weight of 2,000 Da.

[1074] In some embodiments, the helper lipid is between about 20 mol % to 80 mol % of the total lipid content of the composition. In some embodiments, the helper lipid component is between about 35 mol % to 65 mol % of the total lipid content of the LNP. In some embodiments, the LNP includes lipids at 50 mol % and the helper lipid at 50 mol % of the total lipid content of the LNP.

[1075] In some embodiments, the LNP includes any of -3-arginyl-2,3-diaminopropionic acid-N-palmityl-N-oleyl-amide trihydrochloride, -arginyl-2,3-diaminopropionic acid-N-lauryl-N-myristyl-amide trihydrochloride or arginyl-lysine-N-lauryl-N-myristyl-amide trihydrochloride in combination with DPhyPE, wherein the content of DPhyPE is about 80 mol %, 65 mol %, 50 mol % and 35 mol % of the overall lipid content of the LNP. In some embodiments, the LNP includes -arginyl-2,3-diamino propionic acid-N-pahnityl-N-oleyl-amide trihydrochloride (lipid) and 1,2-diphytanoyl-sn-glycero-3-phosphoethanolamine (helper lipid). In some embodiments, the LNP includes -arginyl-2,3-diamino propionic acid-N-palmityl-N-oleyl-amide trihydrochloride (lipid), 1,2-diphytanoyl-sn-glycero-3-phosphoethanolamine (first helper lipid), and 1,2-disteroyl-sn-glycero-3-phosphoethanolamine-PEG2000 (second helper lipid).

[1076] In some embodiments, the second helper lipid is between about 0.05 mol % to 4.9 mol % or between about 1 mol % to 3 mol % of the total lipid content. In some embodiments, the LNP includes lipids at between about 45 mol % to 50 mol % of the total lipid content, a first helper lipid between about 45 mol % to 50 mol % of the total lipid content, under the proviso that there is a PEGylated second helper lipid between about 0.1 mol % to 5 mol %, between about 1 mol % to 4 mol %, or at about 2 mol % of the total lipid content, wherein the sum of the content of the lipids, the first helper lipid, and of the second helper lipid is 100 mol % of the total lipid content and wherein the sum of the first helper lipid and the second helper lipid is 50 mol % of the total lipid content. In some embodiments, the LNP comprises: (a) 50 mol % of arginyl-2,3-diamino propionic acid-N-palmityl-N-oleyl-amide trihydrochloride, 48 mol % of 1,2-diphytanoyl-sn-glycero-3-phosphoethanolamine; and 2 μmol % 1,2-distearoyl-sn-glycero-3-phosphoethanolamine-PEG2000; or (b) 50 mol % of -arginyl-2,3-diamino propionic acid-N-palmityl-N-oleyl-amide trihydrocloride, 49 μmol % 1,2-diphytanoyl-sn-glycero-3-phosphoethanolamine; and 1 μmol % N(Carbonyl-methoxypolyethylenglycol-2000)-1,2-distearoyl-sn-glycero3-phosphoethanolamine, or a sodium salt thereof.

[1077] In some embodiments, the LNP contains a nucleic acid, wherein the charge ratio of nucleic acid backbone phosphates to cationic lipid nitrogen atoms is about 1:1.5-7 or about 1:4.

[1078] In some embodiments, the LNP also includes a shielding compound, which is removable from the lipid composition under in vivo conditions. In some embodiments, the shielding compound is a biologically inert compound. In some embodiments, the shielding compound does not carry any charge on its surface or on the molecule as such. In some embodiments, the shielding compounds are polyethylenglycoles (PEGs), hydroxyethylglucose (HEG) based polymers, polyhydroxyethyl starch (polyHES) and polypropylene. In some embodiments, the PEG, HEG, polyHES, and a polypropylene weight between about 500 to 10,000 Da or between about 2000 to 5000 Da. In some embodiments, the shielding compound is PEG2000 or PEG5000.

[1079] In some embodiments, the LNP includes at least one lipid, a first helper lipid, and a shielding compound that is removable from the lipid composition under in vivo conditions. In some embodiments, the LNP also includes a second helper lipid. In some embodiments, the first helper lipid is ceramide. In some embodiments, the second helper lipid is ceramide. In some embodiments, the ceramide comprises at least one short carbon chain substituent of from 6 to 10 carbon atoms. In some embodiments, the ceramide comprises 8 carbon atoms. In some embodiments, the shielding compound is attached to a ceramide. In some embodiments, the shielding compound is attached to a ceramide. In some embodiments, the shielding compound is covalently attached to the ceramide. In some embodiments, the shielding compound is attached to a nucleic acid in the LNP. In some embodiments, the shielding compound is covalently attached to the nucleic acid. In some embodiments, the shielding compound is attached to the nucleic acid by a linker. In some embodiments, the linker is cleaved under physiological conditions. In some embodiments, the linker is selected from ssRNA, ssDNA, dsRNA, dsDNA, peptide, S-S-linkers and pH sensitive linkers. In some embodiments, the linker moiety is attached to the 3′ end of the sense strand of the nucleic acid. In some embodiments, the shielding compound comprises a pH-sensitive linker or a pH-sensitive moiety. In some embodiments, the pH-sensitive linker or pH-sensitive moiety is an anionic linker or an anionic moiety. In some embodiments, the anionic linker or anionic moiety is less anionic or neutral in an acidic environment. In some embodiments, the pH-sensitive linker or the pH-sensitive moiety is selected from the oligo (glutamic acid), oligophenolate(s) and diethylene triamine penta acetic acid.

[1080] In any of the LNP embodiments in the previous paragraph, the LNP can have an osmolality between about 50 to 600 mosmole/kg, between about 250 to 350 mosmole/kg, or between about 280 to 320 mosmole/kg, and/or wherein the LNP formed by the lipid and/or one or two helper lipids and the shielding compound have a particle size between about 20 to 200 nm, between about 30 to 100 nm, or between about 40 to 80 nm.

[1081] In some embodiments, the shielding compound provides for a longer circulation time in vivo and allows for a better biodistribution of the nucleic acid containing LNP. In some embodiments, the shielding compound prevents immediate interaction of the LNP with serum compounds or compounds of other bodily fluids or cytoplasma membranes, e.g., cytoplasma membranes of the endothelial lining of the vasculature, into which the LNP is administered. Additionally or alternatively, in some embodiments, the shielding compounds also prevent elements of the immune system from immediately interacting with the LNP. Additionally or alternatively, in some embodiments, the shielding compound acts as an anti-opsonizing compound. Without wishing to be bound by any mechanism or theory, in some embodiments, the shielding compound forms a cover or coat that reduces the surface area of the LNP available for interaction with its environment. Additionally or alternatively, in some embodiments, the shielding compound shields the overall charge of the LNP.

[1082] In another embodiment, the LNP includes at least one cationic lipid having Formula VI:

[chemical structure]

[1083] wherein n is 1, 2, 3, or 4, wherein m is 1, 2, or 3, wherein Y⁻ is anion, wherein each of R¹ and R² is individually and independently selected from the group consisting of linear C12-C18 alkyl and linear C12-C18 alkenyl, a sterol compound, wherein the sterol compound is selected from the group consisting of cholesterol and stigmasterol, and a PEGylated lipid, wherein the PEGylated lipid comprises a PEG moiety, wherein the PEGylated lipid is selected from the group consisting of:

[1084] a PEGylated phosphoethanolamine of Formula VII:

[chemical structure]

[1085] wherein R³ and R⁴ are individually and independently linear C13-C17 alkyl, and p is any integer between 15 to 130;

[1086] a PEGylated ceramide of Formula VIII:

[chemical structure]

[1087] wherein R⁵ is linear C7-C15 alkyl, and q is any number between 15 to 130; and

[1088] a PEGylated diacylglycerol of Formula IX:

[chemical structure]

[1089] wherein each of R⁶ and R⁷ is individually and independently linear C11-C17 alkyl, and r is any integer from 15 to 130.

[1090] In some embodiments, R¹ and R² are different from each other. In some embodiments, R¹ is palmityl and R² is oleyl. In some embodiments, R¹ is lauryl and R² is myristyl. In some embodiments, R¹ and R² are the same. In some embodiments, each of R¹ and R² is individually and independently selected from the group consisting of C12 alkyl, C14 alkyl, C16 alkyl, C18 alkyl, C12 alkenyl, C14 alkenyl, C16 alkenyl and C18 alkenyl. In some embodiments, each of C12 alkenyl, C14 alkenyl, C16 alkenyl and C18 alkenyl comprises one or two double bonds. In some embodiments, C18 alkenyl is C18 alkenyl with one double bond between C9 and C10. In some embodiments, C18 alkenyl is cis-9-octadecyl.

[1091] In some embodiments, the cationic lipid is a compound of Formula X:

[chemical structure]

In some embodiments, Y⁻ is selected from halogenids, acetate and trifluoroacetate. In some embodiments, the cationic lipid is β-arginyl-2,3-diamino propionic acid-N-palmityl-N-oleyl-amide trihydrochloride of Formula III:

[chemical structure]

In some embodiments, the cationic lipid is β-arginyl-2,3-diamino propionic acid-N-lauryl-N-myristyl-amide trihydrochloride of Formula IV:

[chemical structure]

In some embodiments, the cationic lipid is ε-arginyl-lysine-N-lauryl-N-myristyl-amide trihydrochloride of Formula V:

[chemical structure]

[1092] In some embodiments, the sterol compound is cholesterol. In some embodiments, the sterol compound is stigmasterin.

[1093] In some embodiments, the PEG moiety of the PEGylated lipid has a molecular weight from about 800 to 5,000 Da. In some embodiments, the molecular weight of the PEG moiety of the PEGylated lipid is about 800 Da. In some embodiments, the molecular weight of the PEG moiety of the PEGylated lipid is about 2,000 Da. In some embodiments, the molecular weight of the PEG moiety of the PEGylated lipid is about 5,000 Da. In some embodiments, the PEGylated lipid is a PEGylated phosphoethanolamine of Formula VII, wherein each of R³ and R⁴ is individually and independently linear C13-C17 alkyl, and p is any integer from 18, 19 or 20, or from 44, 45 or 46 or from 113, 114 or 115. In some embodiments, R³ and R⁴ are the same. In some embodiments, R³ and R⁴ are different. In some embodiments, each of R³ and R⁴ is individually and independently selected from the group consisting of C13 alkyl, C15 alkyl and C17 alkyl. In some embodiments, the PEGylated phosphoethanolamine of Formula VII is 1,2-di stearoyl-sn-glycero-3-phosphoethanolamine-N-[methoxy(polyethylene glycol)-2000](ammonium salt):

[chemical structure]

In some embodiments, the PEGylated phosphoethanolamine of Formula VII is 1,2-distearoyl-sn-glycero-3-phosphoethanolamine-N-[methoxy(polyethylene glycol)-5000] (ammonium salt):

[chemical structure]

In some embodiments, the PEGylated lipid is a PEGylated ceramide of Formula VIII, wherein R⁵ is linear C7-C15 alkyl, and q is any integer from 18, 19 or 20, or from 44, 45 or 46 or from 113, 114 or 115. In some embodiments, R⁵ is linear C7 alkyl. In some embodiments, R⁵ is linear C15 alkyl. In some embodiments, the PEGylated ceramide of Formula VIII is N-octanoyl-sphingosine-1-{succinyl[methoxy(polyethylene glycol)2000] }:

[chemical structure]

In some embodiments, the PEGylated ceramide of Formula VIII is N-palmitoyl-sphingosine-1-{succinyl[methoxy(polyethylene glycol)2000] }

[chemical structure]

[1094] In some embodiments, the PEGylated lipid is a PEGylated diacylglycerol of Formula IX, wherein each of R⁶ and R⁷ is individually and independently linear C11-C17 alkyl, and r is any integer from 18, 19 or 20, or from 44, 45 or 46 or from 113, 114 or 115. In some embodiments, R⁶ and R⁷ are the same. In some embodiments, R⁶ and R⁷ are different. In some embodiments, each of R⁶ and R⁷ is individually and independently selected from the group consisting of linear C17 alkyl, linear C15 alkyl and linear C13 alkyl. In some embodiments, the PEGylated diacylglycerol of Formula IX 1,2-Distearoyl-sn-glycerol [methoxy(polyethylene glycol)2000]:

[chemical structure]

[1095] In some embodiments, the PEGylated diacylglycerol of Formula IX is 1,2-Dipalmitoyl-sn-glycerol [methoxy(polyethylene glycol)2000]:

[chemical structure]

In some embodiments, the PEGylated diacylglycerol of Formula IX is:

[chemical structure]

In some embodiments, the LNP includes at least one cationic lipid selected from of Formulas III, IV, and V, at least one sterol compound selected from a cholesterol and stigmasterin, and wherein the PEGylated lipid is at least one selected from Formulas XI and XII. In some embodiments, the LNP includes at least one cationic lipid selected from Formulas III, IV, and V, at least one sterol compound selected from a cholesterol and stigmasterin, and wherein the PEGylated lipid is at least one selected from Formulas XIII and XIV. In some embodiments, the LNP includes at least one cationic lipid selected from Formulas III, IV, and V, at least one sterol compound selected from a cholesterol and stigmasterin, and wherein the PEGylated lipid is at least one selected from Formulas XV and XVI. In some embodiments, the LNP includes a cationic lipid of Formula III, a cholesterol as the sterol compound, and wherein the PEGylated lipid is Formula XI.

[1096] In any of the LNP embodiments in the previous paragraph, wherein the content of the cationic lipid composition is between about 65 mole % to 75 mole %, the content of the sterol compound is between about 24 mole % to 34 mole % and the content of the PEGylated lipid is between about 0.5 mole % to 1.5 mole %, wherein the sum of the content of the cationic lipid, of the sterol compound and of the PEGylated lipid for the lipid composition is 100 mole %. In some embodiments, the cationic lipid is about 70 mole %, the content of the sterol compound is about 29 mole % and the content of the PEGylated lipid is about 1 mole %. In some embodiments, the LNP is 70 mole % of Formula III, 29 mole % of cholesterol, and 1 mole % of Formula XI.

### Exosomes

[1097] Exosomes are endogenous nano-vesicles that transport RNAs and proteins, and which can deliver RNA to the brain and other target organs. To reduce immunogenicity, Alvarez-Erviti et al. (2011, Nat Biotechnol 29: 341) used self-derived dendritic cells for exosome production. Targeting to the brain was achieved by engineering the dendritic cells to express Lamp2b, an exosomal membrane protein, fused to the neuron-specific RVG peptide. Purified exosomes were loaded with exogenous RNA by electroporation. Intravenously injected RVG-targeted exosomes delivered GAPDH siRNA specifically to neurons, microglia, oligodendrocytes in the brain, resulting in a specific gene knockdown. Pre-exposure to RVG exosomes did not attenuate knockdown, and non-specific uptake in other tissues was not observed. The therapeutic potential of exosome-mediated siRNA delivery was demonstrated by the strong mRNA (60%) and protein (62%) knockdown of BACE1, a therapeutic target in Alzheimer's disease.

[1098] To obtain a pool of immunologically inert exosomes, Alvarez-Erviti et al. harvested bone marrow from inbred C57BL/6 mice with a homogenous major histocompatibility complex (MHC) haplotype. As immature dendritic cells produce large quantities of exosomes devoid of T-cell activators such as MHC-II and CD86, Alvarez-Erviti et al. selected for dendritic cells with granulocyte/macrophage-colony stimulating factor (GM-CSF) for 7 d. Exosomes were purified from the culture supernatant the following day using well-established ultracentrifugation protocols. The exosomes produced were physically homogenous, with a size distribution peaking at 80 nm in diameter as determined by nanoparticle tracking analysis (NTA) and electron microscopy. Alvarez-Erviti et al. obtained 6-12 μg of exosomes (measured based on protein concentration) per 10⁶ cells.

[1099] Next, Alvarez-Erviti et al. investigated the possibility of loading modified exosomes with exogenous cargoes using electroporation protocols adapted for nanoscale applications. As electroporation for membrane particles at the nanometer scale is not well-characterized, nonspecific Cy5-labeled RNA was used for the empirical optimization of the electroporation protocol. The amount of encapsulated RNA was assayed after ultracentrifugation and lysis of exosomes. Electroporation at 400 V and 125 μF resulted in the greatest retention of RNA and was used for all subsequent experiments.

[1100] Alvarez-Erviti et al. administered 150 μg of each BACE1 siRNA encapsulated in 150 μg of RVG exosomes to normal C57BL/6 mice and compared the knockdown efficiency to four controls: untreated mice, mice injected with RVG exosomes only, mice injected with BACE1 siRNA complexed to an in vivo cationic liposome reagent and mice injected with BACE1 siRNA complexed to RVG-9R, the RVG peptide conjugated to 9 D-arginines that electrostatically binds to the siRNA. Cortical tissue samples were analyzed 3 d after administration and a significant protein knockdown (45%, P<0.05, versus 62%, P<0.01) in both siRNA-RVG-9R-treated and siRNARVG exosome-treated mice was observed, resulting from a significant decrease in BACE1 mRNA levels (66% [+ or −] 15%, P<0.001 and 61% [+ or −] 13% respectively, P<0.01). Moreover, Applicants demonstrated a significant decrease (55%, P<0.05) in the total [beta]-amyloid 1-42 levels, a main component of the amyloid plaques in Alzheimer's pathology, in the RVG-exosome-treated animals. The decrease observed was greater than the β-amyloid 1-40 decrease demonstrated in normal mice after intraventricular injection of BACE1 inhibitors. Alvarez-Erviti et al. carried out 5′-rapid amplification of cDNA ends (RACE) on BACE1 cleavage product, which provided evidence of RNAi-mediated knockdown by the siRNA.

[1101] Finally, Alvarez-Erviti et al. investigated whether RNA-RVG exosomes induced immune responses in vivo by assessing IL-6, IP-10, TNFα and IFN-α serum concentrations. Following exosome treatment, nonsignificant changes in all cytokines were registered similar to siRNA-transfection reagent treatment in contrast to siRNA-RVG-9R, which potently stimulated IL-6 secretion, confirming the immunologically inert profile of the exosome treatment. Given that exosomes encapsulate only 20% of siRNA, delivery with RVG-exosome appears to be more efficient than RVG-9R delivery as comparable mRNA knockdown and greater protein knockdown was achieved with fivefold less siRNA without the corresponding level of immune stimulation. This experiment demonstrated the therapeutic potential of RVG-exosome technology, which is potentially suited for long-term silencing of genes related to neurodegenerative diseases. The exosome delivery system of Alvarez-Erviti et al. may be applied to deliver the CRISPR-Cas system of the present invention to therapeutic targets, especially neurodegenerative diseases. A dosage of about 100 to 1000 mg of CRISPR Cas encapsulated in about 100 to 1000 mg of RVG exosomes may be contemplated for the present invention.

[1102] El-Andaloussi et al. (Nature Protocols 7,2112-2126(2012)) discloses how exosomes derived from cultured cells can be harnessed for delivery of RNA in vitro and in vivo. This protocol first describes the generation of targeted exosomes through transfection of an expression vector, comprising an exosomal protein fused with a peptide ligand. Next, El-Andaloussi et al. explain how to purify and characterize exosomes from transfected cell supernatant. Next, El-Andaloussi et al. detail crucial steps for loading RNA into exosomes. Finally, El-Andaloussi et al. outline how to use exosomes to efficiently deliver RNA in vitro and in vivo in mouse brain. Examples of anticipated results in which exosome-mediated RNA delivery is evaluated by functional assays and imaging are also provided. The entire protocol takes ˜3 weeks. Delivery or administration according to the invention may be performed using exosomes produced from self-derived dendritic cells. From the herein teachings, this can be employed in the practice of the invention.

[1103] In another embodiment, the plasma exosomes of Wahlgren et al. (Nucleic Acids Research, 2012, Vol. 40, No. 17 e130) are contemplated. Exosomes are nano-sized vesicles (30-90 nm in size) produced by many cell types, including dendritic cells (DC), B cells, T cells, mast cells, epithelial cells and tumor cells. These vesicles are formed by inward budding of late endosomes and are then released to the extracellular environment upon fusion with the plasma membrane. Because exosomes naturally carry RNA between cells, this property may be useful in gene therapy, and from this disclosure can be employed in the practice of the instant invention.

[1104] Exosomes from plasma can be prepared by centrifugation of buffy coat at 900 g for 20 min to isolate the plasma followed by harvesting cell supernatants, centrifuging at 300g for 10 min to eliminate cells and at 16 500 g for 30 min followed by filtration through a 0.22 mm filter. Exosomes are pelleted by ultracentrifugation at 120 000 g for 70 min. Chemical transfection of siRNA into exosomes is carried out according to the manufacturer's instructions in RNAi Human/Mouse Starter Kit (Quiagen, Hilden, Germany). siRNA is added to 100 ml PBS at a final concentration of 2 mmol/ml. After adding HiPerFect transfection reagent, the mixture is incubated for 10 min at RT. In order to remove the excess of micelles, the exosomes are re-isolated using aldehyde/sulfate latex beads. The chemical transfection of CRISPR Cas into exosomes may be conducted similarly to siRNA. The exosomes may be co-cultured with monocytes and lymphocytes isolated from the peripheral blood of healthy donors. Therefore, it may be contemplated that exosomes containing CRISPR Cas may be introduced to monocytes and lymphocytes of and autologously reintroduced into a human. Accordingly, delivery or administration according to the invention may be performed using plasma exosomes.

### Liposomes

[1105] The lipid, lipid particle, or lipid bylayer or lipid entity of the invention can be prepared by methods well known in the art. See Wang et al., ACS Synthetic Biology, 1, 403-07 (2012); Wang et al., PNAS, 113(11) 2868-2873 (2016); Manoharan, et al., WO 2008/042973; Zugates et al., U.S. Pat. No. 8,071,082; Xu et al., WO 2014/186366 A1 (US20160082126). Xu et provides a way to make a nanocomplex for the delivery of saporin wherein the nanocomplex comprising saporin and a lipid-like compound, and wherein the nanocomplex has a particle size of 50 nm to 1000 nm; the saporin binds to the lipid-like compound via non-covalent interaction or covalent bonding; and the lipid-like compound has a hydrophilic moiety, a hydrophobic moiety, and a linker joining the hydrophilic moiety and the hydrophobic moiety, the hydrophilic moiety being optionally charged and the hydrophobic moiety having 8 to 24 carbon atoms. Xu et al., WO 2014/186348 (US20160129120) provides examples of nanocomplexes of modified peptides or proteins comprising a cationic delivery agent and an anionic pharmaceutical agent, wherein the nanocomplex has a particle size of 50 to 1000 nm, the cationic delivery agent binds to the anionic pharmaceutical agent, and the anionic pharmaceutical agent is a modified peptide or protein formed of a peptide and a protein and an added chemical moiety that contains an anionic group. The added chemical moiety is linked to the peptide or protein via an amide group, an ester group, an ether group, a thioether group, a disulfide group, a hydrazone group, a sulfenate ester group, an amidine group, a urea group, a carbamate group, an imidoester group, or a carbonate group. More particularly these documents provide examples of lipid or lipid-like compounds that can be used to make the particle delivery system of the present invention, including compounds of the formula B₁-K₁-A-K₂-B₂, in which A, the hydrophilic moiety, is

[chemical structure]

each of Rₐ, Ra′, Rₐ″, and Rₐ′″, independently, being a C₁-C₂₀ monovalent aliphatic radical, a C₁-C_{20 0} monovalent heteroaliphatic radical, a monovalent aryl radical, or a monovalent heteroaryl radical; and Z being a C₁-C₂₀ bivalent aliphatic radical, a C₁-C₂₀ bivalent heteroaliphatic radical, a bivalent aryl radical, or a bivalent heteroaryl radical; each of B₁, the hydrophobic moiety, and B₂, also the hydrophobic moiety, independently, is a C₁₂₋₂₀ aliphatic radical or a C₁₂₋₂₀ heteroaliphatic radical; and each of K₁, the linker, and K₂, also the linker, independently, is O, S, Si, C₁-C₆ alkylene

[chemical structure]

in which each of m, n, p, q, and t, independently, is 1-6; W is O, S, or NRc; each of Li, L₃, L₅, L₇, and L₉, independently, is a bond, O, S, or NR_{d}; each of L2, L₄, L₆, L₈, and L₁₀, independently, is a bond, O, S, or NRₑ; and V is OR_{f}, SR_{g}, or NRₕRᵢ, each of R_{b}, R_{c}, R_{d}, Rₑ, R_{f}, R_{g}, Rₕ, and Rᵢ, independently, being H, OH, a C₁-C₁₀ oxyaliphatic radical, a C₁-C₁₀ monovalent aliphatic radical, a C₁-C₁₀ monovalent heteroaliphatic radical, a monovalent aryl radical, or a monovalent heteroaryl radical and specific compounds:

[chemical structure]

[chemical structure]

[chemical structure]

[1106] Additional examples of cationic lipid that can be used to make the particle delivery system of the invention can be found in US20150140070, wherein the cationic lipid has the formula

[chemical structure]

wherein p is an integer between 1 and 9, inclusive; each instance of Q is independently O, S, or NR^{Q}; R^{Q} is hydrogen, optionally substituted alkyl, optionally substituted alkenyl, optionally substituted alkynyl, optionally substituted carbocyclyl, optionally substituted heterocyclyl, optionally substituted aryl, optionally substituted heteroaryl, a nitrogen protecting group, or a group of the formula (i), (ii) or (iii); each instance of R¹ is independently hydrogen, optionally substituted alkyl, optionally substituted alkenyl, optionally substituted alkynyl, optionally substituted carbocyclyl, optionally substituted heterocyclyl, optionally substituted aryl, optionally substituted heteroaryl, halogen, —OR^{A1}, —N(R^{A1})₂, SR^{A1}, or a group of formula:

[chemical structure]

L is an optionally substituted alkylene, optionally substituted alkenylene, optionally substituted alkynylene, optionally substituted heteroalkylene, optionally substituted heteroalkenylene, optionally substituted heteroalkynylene, optionally substituted carbocyclylene, optionally substituted heterocyclylene, optionally substituted arylene, or optionally substituted heteroarylene, or combination thereof, and each of R⁶ and R⁷ is independently hydrogen, optionally substituted alkyl, optionally substituted alkenyl, optionally substituted alkynyl, optionally substituted carbocyclyl, optionally substituted heterocyclyl, optionally substituted aryl, optionally substituted heteroaryl, a nitrogen protecting group, or a group of formula (i), (ii) or (iii); each occurrence of R^{A1} is independently hydrogen, optionally substituted alkyl, optionally substituted alkenyl, optionally substituted alkynyl, optionally substituted carbocyclyl, optionally substituted heterocyclyl, optionally substituted aryl, optionally substituted heteroaryl, an oxygen protecting group when attached to an oxygen atom, a sulfur protecting group when attached to an sulfur atom, a nitrogen protecting group when attached to a nitrogen atom, or two R^{A1} groups, together with the nitrogen atom to which they are attached, are joined to form an optionally substituted heterocyclic or optionally substituted heteroaryl ring; each instance of R² is independently hydrogen, optionally substituted alkyl, optionally substituted alkenyl, optionally substituted alkynyl, optionally substituted carbocyclyl, optionally substituted heterocyclyl, optionally substituted aryl, optionally substituted heteroaryl, a nitrogen protecting group, or a group of the formula (i), (ii), or (iii); Formulae (i), (ii), and (iii) are:

[chemical structure]

each instance of R′ is independently hydrogen or optionally substituted alkyl; X is O, S, or NRX; RX is hydrogen, optionally substituted alkyl, optionally substituted alkenyl, optionally substituted alkynyl, optionally substituted carbocyclyl, optionally substituted heterocyclyl, optionally substituted aryl, optionally substituted heteroaryl, or a nitrogen protecting group; Y is O, S, or NRY; RY is hydrogen, optionally substituted alkyl, optionally substituted alkenyl, optionally substituted alkynyl, optionally substituted carbocyclyl, optionally substituted heterocyclyl, optionally substituted aryl, optionally substituted heteroaryl, or a nitrogen protecting group; RP is hydrogen, optionally substituted alkyl, optionally substituted alkenyl, optionally substituted alkynyl, optionally substituted carbocyclyl, optionally substituted heterocyclyl, optionally substituted aryl, optionally substituted heteroaryl, an oxygen protecting group when attached to an oxygen atom, a sulfur protecting group when attached to a sulfur atom, or a nitrogen protecting group when attached to a nitrogen atom; RL is optionally substituted C1-50 alkyl, optionally substituted C2-50 alkenyl, optionally substituted C2-50 alkynyl, optionally substituted heteroC1-50 alkyl, optionally substituted heteroC2-50 alkenyl, optionally substituted heteroC2-50 alkynyl, or a polymer; provided that at least one instance of RQ, R2, R6, or R7 is a group of the formula (i), (ii), or (iii); in Liu et al., (US 20160200779, US 20150118216, US 20150071903, and US 20150071903), which provide examples of cationic lipids to include polyethylenimine, polyamidoamine (PAMAM) starburst dendrimers, Lipofectin (a combination of DOTMA and DOPE), Lipofectase, LIPOFECTAMINE® (e.g., LIPOFECTAMINE® 2000, LIPOFECTAMINE® 3000, LIPOFECTAMINE® RNAiMAX, LIPOFECTAMINE® LTX), SAINT-RED (Synvolux Therapeutics, Groningen Netherlands), DOPE, Cytofectin (Gilead Sciences, Foster City, Calif.), and Eufectins (JBL, San Luis Obispo, Calif.). Exemplary cationic liposomes can be made from N-[1-(2,3-dioleoloxy)-propyl]-N,N,N-trimethylammonium chloride (DOTMA), N-[1-(2,3-dioleoloxy)-propyl]-N,N,N-trimethylammonium methylsulfate (DOTAP), 3.beta.-[N—(N′,N′-dimethylaminoethane)carbamoyl]cholesterol (DC-Chol), 2,3,-dioleyloxy-N-[2(sperminecarboxamido)ethyl]-N,N-dimethyl-1-propanamin-ium trifluoroacetate (DOSPA), 1,2-dimyristyloxypropyl-3-dimethyl-hydroxyethyl ammonium bromide; and dimethyldioctadecylammonium bromide (DDAB); in WO2013/093648 which provides cationic lipids of formula

[chemical structure]

in which Z=an alkyl linker, C₂-C₄ alkyl, Y=an alkyl linker, C₁-C₆ alkyl, R₁ and R₂ are each independently C₁₀-C₃₀alkyl, C₁₀-C₃₀alkenyl, or C₁₀-C₃₀alkynyl, C₁₀-C₃₀alkyl, C₁₀-C₂₀alkyl, C₁₂-C₁₅alkyl, C₁₃-C₁₇alkyl, C₁₃alkyl, C₁₀-C₃₀alkenyl, C₁₀-C₂₀alkenyl. C₁₂-C₁₅alkenyl, C₁₃-C₁₇alkenyl, C₁₇alkenyl; R3 and R4 are each independently hydrogen, C₁-C₆ alkyl, or —CH₂CH₂OH, C₁-C₆ alkyl, C₁-C₃alkyl; n is 1-6; and X is a counterion, including any nitrogen counterion, as that term is readily understood in the art, and specific cationic lipids including

[chemical structure]

WO2013/093648 also provides examples of other cationic charged lipids at physiological pH including N,N-dioleyl-N,N-dimethylammonium chloride (DODAC), N,N-distearyl-N,N-dimethylammonium bromide (DDAB); N-(1,2-dimyristyloxyprop-3-yl)-N,N-dimethyl-N-hydroxyethylammonium bromide (DMRIE) and dioctadecylamidoglycyl carboxyspermidine (DOGS); in US 20160257951, which provides cationic lipids with a general formula

[chemical structure]

or a pharmacologically acceptable salt thereof, wherein R¹ and R² are each independently a hydrogen atom, a C₁-C₆ alkyl group optionally substituted with one or more substituents selected from substituent group α, a C₂-C₆ alkenyl group optionally substituted with one or more substituents selected from substituent group α, a C₂-C₆ alkynyl group optionally substituted with one or more substituents selected from substituent group α, or a C₃-C₇ cycloalkyl group optionally substituted with one or more substituents selected from substituent group α, or R¹ and R² form a 3- to 10-membered heterocyclic ring together with the nitrogen atom bonded thereto, wherein the heterocyclic ring is optionally substituted with one or more substituents selected from substituent group α and optionally contains one or more atoms selected from a nitrogen atom, an oxygen atom, and a sulfur atom, in addition to the nitrogen atom bonded to R¹ and R², as atoms constituting the heterocyclic ring; R⁸ is a hydrogen atom or a C₁-C₆ alkyl group optionally substituted with one or more substituents selected from substituent group α; or R¹ and R⁸ together are the group —(CH₂)_{q}—; substituent group a consists of a halogen atom, an oxo group, a hydroxy group, a sulfanyl group, an amino group, a cyano group, a C₁-C₆ alkyl group, a C₁-C₆ halogenated alkyl group, a C₁-C₆ alkoxy group, a C₁-C₆ alkylsulfanyl group, a C₁-C₆ alkylamino group, and a C₁-C₇ alkanoyl group; L¹ is a C₁₀-C₂₄ alkyl group optionally substituted with one or more substituents selected from substituent group β1, a C₁₀-C₂₄ alkenyl group optionally substituted with one or more substituents selected from substituent group β1, a C₃-C₂₄ alkynyl group optionally substituted with one or more substituents selected from substituent group β1, or a (C₁-C₁₀ alkyl)-(Q)ₖ-(C₁-C₁₀ alkyl) group optionally substituted with one or more substituents selected from substituent group β1; L² is, independently of L¹, a C₁₀-C₂₄ alkyl group optionally substituted with one or more substituents selected from substituent group β1, a C₁₀-C₂₄ alkenyl group optionally substituted with one or more substituents selected from substituent group β1, a C₃-C₂₄ alkynyl group optionally substituted with one or more substituents selected from substituent group β1, a (C₁-C₁₀ alkyl)-(Q)ₖ-(C1-C10 alkyl) group optionally substituted with having one or more substituents selected from substituent group β1, a (C₁₀-C₂₄ alkoxy)methyl group optionally substituted with one or more substituents selected from substituent group β1, a (C10-C₂₄ alkenyl)oxymethyl group optionally substituted with one or more substituents selected from substituent group β1, a (C₃-C₂₄ alkynyl)oxymethyl group optionally substituted with one or more substituents selected from substituent group β1, or a (C₁-C₁₀ alkyl)-(Q)ₖ-(C₁-C₁₀ alkoxy)methyl group optionally substituted with one or more substituents selected from substituent group β1; substituent group β1 consists of a halogen atom, an oxo group, a cyano group, a C₁-C₆ alkyl group, a C₁-C₆ halogenated alkyl group, a C₁-C₆ alkoxy group, a C₁-C₆ alkylsulfanyl group, a C₁-C₇ alkanoyl group, a C₁-C₇ alkanoyloxy group, a C₃-C₇ alkoxyalkoxy group, a (C₁-C₆ alkoxy)carbonyl group, a (C₁-C₆ alkoxy)carboxyl group, a (C₁-C₆ alkoxy)carbamoyl group, and a (C₁-C₆ alkylamino)carboxyl group; Q is a group of formula:

[chemical structure]

when L¹ and L² are each substituted with one or more substituents selected from substituent group β1 and substituent group β1 is a C₁-C₆ alkyl group, a C₁-C₆ alkoxy group, a C₁-C₆ alkylsulfanyl group, a C1-C7 alkanoyl group, or a C1-C7 alkanoyloxy group, the substituent or substituents selected from substituent group β1 in L and the substituent or substituents selected from substituent group β1 in L² optionally bind to each other to form a cyclic structure; k is 1, 2, 3, 4, 5, 6, or 7; m is 0 or 1; p is 0, 1, or 2; q is 1, 2, 3, or 4; and r is 0, 1, 2, or 3, provided that p+r is 2 or larger, or q+r is 2 or larger, and specific cationic lipids including

[chemical structure]

[chemical structure]

and in US 20160244761, which provides cationic lipids that include 1,2-distearyloxy-N,N-dimethyl-3-aminopropane (DSDMA), 1,2-dioleyloxy-N,N-dimethyl-3-aminopropane (DODMA), 1,2-dilinoleyloxy-N,N-dimethyl-3-aminopropane (DLinDMA), 1,2-dilinolenyloxy-N,N-dimethyl-3-aminopropane (DLenDMA), 1,2-di-.gamma.-linolenyloxy-N,N-dimethylaminopropane (.gamma.-DLenDMA), 1,2-dilinoleyloxy-keto-N,N-dimethyl-3-aminopropane (DLin-K-DMA), 1,2-dilinoleyl-4-(2-dimethylaminoethyl)-[1,3]-dioxolane (DLin-K-C2-DMA) (also known as DLin-C2K-DMA, XTC2, and C2K), 2,2-dilinoleyl-4-(3-dimethylaminopropyl)-[1,3]-dioxolane (DLin-K-C3-DMA), 2,2-dilinoleyl-4-(4-dimethylaminobutyl)-[1,3]-dioxolane (DLin-K-C4-DMA), 1,2-dilinolenyloxy-4-(2-dimethylaminoethyl)-[1,3]-dioxolane (DLen-C2K-DMA), 1,2-di-.gamma.-linolenyloxy-4-(2-dimethylaminoethyl)-[1,3]-dioxolane (.gamma.-DLen-C2K-DMA), dilinoleylmethyl-3-dimethylaminopropionate (DLin-M-C2-DMA) (also known as MC2), (6Z,9Z,28Z,31Z)-heptatriaconta-6,9,28,31-tetraen-19-yl 4-(dimethylamino) butanoate (DLin-M-C3-DMA) (also known as MC3) and 3-(dilinoleylmethoxy)-N,N-dimethylpropan-1-amine (DLin-MP-DMA) (also known as 1-Bl 1).

[1107] In one embodiment, the lipid compound is preferably a bio-reducible material, e.g., a bio-reducible polymer and a bio-reducible lipid-like compound.

[1108] In embodiment, the lipid compound comprises a hydrophilic head, and a hydrophobic tail, and optionally a linker.

[1109] In one embodiment, the hydrophilic head contains one or more hydrophilic functional groups, e.g., hydroxyl, carboxyl, amino, sulfhydryl, phosphate, amide, ester, ether, carbamate, carbonate, carbamide and phosphodiester. These groups can form hydrogen bonds and are optionally positively or negatively charged, in particular at physiological conditions such as physiological pH.

[1110] In one embodiment, the hydrophobic tail is a saturated or unsaturated, linear or branched, acyclic or cyclic, aromatic or nonaromatic hydrocarbon moiety, wherein the saturated or unsaturated, linear or branched, acyclic or cyclic, aromatic or nonaromatic hydrocarbon moiety optionally contains a disulfide bond and/or 8-24 carbon atoms. One or more of the carbon atoms can be replaced with a heteroatom, such as N, O, P, B, S, Si, Sb, Al, Sn, As, Se, and Ge. The lipid or lipid-like compounds containing disulfide bond can be bioreducible.

[1111] In one embodiment, the linker of the lipid or lipid-like compound links the hydrophilic head and the hydrophobic tail. The linker can be any chemical group that is hydrophilic or hydrophobic, polar or non-polar, e.g., O, S, Si, amino, alkylene, ester, amide, carbamate, carbamide, carbonate phosphate, phosphite, sulfate, sulfite, and thiosulfate.

[1112] The lipid or lipid-like compounds described above include the compounds themselves, as well as their salts and solvates, if applicable. A salt, for example, can be formed between an anion and a positively charged group (e.g., amino) on a lipid-like compound. Suitable anions include chloride, bromide, iodide, sulfate, nitrate, phosphate, citrate, methanesulfonate, trifluoroacetate, acetate, malate, tosylate, tartrate, fumurate, glutamate, glucuronate, lactate, glutarate, and maleate. Likewise, a salt can also be formed between a cation and a negatively charged group (e.g., carboxylate) on a lipid-like compound. Suitable cations include sodium ion, potassium ion, magnesium ion, calcium ion, and an ammonium cation such as tetramethylammonium ion. The lipid-like compounds also include those salts containing quaternary nitrogen atoms. A solvate refers to a complex formed between a lipid-like compound and a pharmaceutically acceptable solvent. Examples of pharmaceutically acceptable solvents include water, ethanol, isopropanol, ethyl acetate, acetic acid, and ethanolamine.

[1113] Delivery or administration according to the invention can be performed with liposomes. Liposomes are spherical vesicle structures composed of a uni- or multilamellar lipid bilayer surrounding internal aqueous compartments and a relatively impermeable outer lipophilic phospholipid bilayer. Liposomes have gained considerable attention as drug delivery carriers because they are biocompatible, nontoxic, can deliver both hydrophilic and lipophilic drug molecules, protect their cargo from degradation by plasma enzymes, and transport their load across biological membranes and the blood brain barrier (BBB) (see, e.g., Spuch and Navarro, Journal of Drug Delivery, vol. 2011, Article ID 469679, 12 pages, 2011. doi:10.1155/2011/469679 for review).

[1114] Liposomes can be made from several different types of lipids; however, phospholipids are most commonly used to generate liposomes as drug carriers. Although liposome formation is spontaneous when a lipid film is mixed with an aqueous solution, it can also be expedited by applying force in the form of shaking by using a homogenizer, sonicator, or an extrusion apparatus (see, e.g., Spuch and Navarro, Journal of Drug Delivery, vol. 2011, Article ID 469679, 12 pages, 2011. doi:10.1155/2011/469679 for review).

[1115] Several other additives may be added to liposomes in order to modify their structure and properties. For instance, either cholesterol or sphingomyelin may be added to the liposomal mixture in order to help stabilize the liposomal structure and to prevent the leakage of the liposomal inner cargo. Further, liposomes are prepared from hydrogenated egg phosphatidylcholine or egg phosphatidylcholine, cholesterol, and dicetyl phosphate, and their mean vesicle sizes were adjusted to about 50 and 100 nm. (see, e.g., Spuch and Navarro, Journal of Drug Delivery, vol. 2011, Article ID 469679, 12 pages, 2011. doi:10.1155/2011/469679 for review).

[1116] A liposome formulation may be mainly comprised of natural phospholipids and lipids such as 1,2-distearoryl-sn-glycero-3-phosphatidyl choline (DSPC), sphingomyelin, egg phosphatidylcholines and monosialoganglioside. Since this formulation is made up of phospholipids only, liposomal formulations have encountered many challenges, one of the ones being the instability in plasma. Several attempts to overcome these challenges have been made, specifically in the manipulation of the lipid membrane. One of these attempts focused on the manipulation of cholesterol. Addition of cholesterol to conventional formulations reduces rapid release of the encapsulated bioactive compound into the plasma or 1,2-dioleoyl-sn-glycero-3-phosphoethanolamine (DOPE) increases the stability (see, e.g., Spuch and Navarro, Journal of Drug Delivery, vol. 2011, Article ID 469679, 12 pages, 2011. doi:10.1155/2011/469679 for review).

[1117] In a particularly advantageous embodiment, Trojan Horse liposomes (also known as Molecular Trojan Horses) are desirable and protocols may be found at cshprotocols.cshlp.org/content/2010/4/pdb.prot5407.long. These particles allow delivery of a transgene to the entire brain after an intravascular injection. Without being bound by limitation, it is believed that neutral lipid particles with specific antibodies conjugated to surface allow crossing of the blood brain barrier via endocytosis. Applicant postulates utilizing Trojan Horse Liposomes to deliver the CRISPR family of nucleases to the brain via an intravascular injection, which would allow whole brain transgenic animals without the need for embryonic manipulation. About 1-5 g of DNA or RNA may be contemplated for in vivo administration in liposomes.

[1118] In another embodiment, the CRISPR Cas system or components thereof may be administered in liposomes, such as a stable nucleic-acid-lipid particle (SNALP) (see, e.g., Morrissey et al., Nature Biotechnology, Vol. 23, No. 8, August 2005). Daily intravenous injections of about 1, 3 or 5 mg/kg/day of a specific CRISPR Cas targeted in a SNALP are contemplated. The daily treatment may be over about three days and then weekly for about five weeks. In another embodiment, a specific CRISPR Cas encapsulated SNALP) administered by intravenous injection to at doses of about 1 or 2.5 mg/kg are also contemplated (see, e.g., Zimmerman et al., Nature Letters, Vol. 441, 4 May 2006). The SNALP formulation may contain the lipids 3-N-[(wmethoxypoly(ethylene glycol) 2000) carbamoyl]-1,2-dimyristyloxy-propylamine (PEG-C-DMA), 1,2-dilinoleyloxy-N,N-dimethyl-3-aminopropane (DLinDMA), 1,2-distearoyl-sn-glycero-3-phosphocholine (DSPC) and cholesterol, in a 2:40:10:48 molar percent ratio (see, e.g., Zimmerman et al., Nature Letters, Vol. 441, 4 May 2006).

[1119] In another embodiment, stable nucleic-acid-lipid particles (SNALPs) have proven to be effective delivery molecules to highly vascularized HepG2-derived liver tumors but not in poorly vascularized HCT-116 derived liver tumors (see, e.g., Li, Gene Therapy (2012) 19, 775-780). The SNALP liposomes may be prepared by formulating D-Lin-DMA and PEG-C-DMA with distearoylphosphatidylcholine (DSPC), Cholesterol and siRNA using a 25:1 lipid/siRNA ratio and a 48/40/10/2 molar ratio of Cholesterol/D-Lin-DMA/DSPC/PEG-C-DMA. The resulted SNALP liposomes are about 80-100 nm in size.

[1120] In yet another embodiment, a SNALP may comprise synthetic cholesterol (Sigma-Aldrich, St Louis, Mo., USA), dipalmitoylphosphatidylcholine (Avanti Polar Lipids, Alabaster, Ala., USA), 3-N-[(w-methoxy poly(ethylene glycol)2000)carbamoyl]-1,2-dimyrestyloxypropylamine, and cationic 1,2-dilinoleyloxy-3-N,Ndimethylaminopropane (see, e.g., Geisbert et al., Lancet 2010; 375: 1896-905). A dosage of about 2 mg/kg total CRISPR Cas per dose administered as, for example, a bolus intravenous infusion may be contemplated.

[1121] In yet another embodiment, a SNALP may comprise synthetic cholesterol (Sigma-Aldrich), 1,2-distearoyl-sn-glycero-3-phosphocholine (DSPC; Avanti Polar Lipids Inc.), PEG-cDMA, and 1,2-dilinoleyloxy-3-(N;N-dimethyl)aminopropane (DLinDMA) (see, e.g., Judge, J. Clin. Invest. 119:661-673 (2009)). Formulations used for in vivo studies may comprise a final lipid/RNA mass ratio of about 9:1.

[1122] The safety profile of RNAi nanomedicines has been reviewed by Barros and Gollob of Alnylam Pharmaceuticals (see, e.g., Advanced Drug Delivery Reviews 64 (2012) 1730-1737). The stable nucleic acid lipid particle (SNALP) is comprised of four different lipids—an ionizable lipid (DLinDMA) that is cationic at low pH, a neutral helper lipid, cholesterol, and a diffusible polyethylene glycol (PEG)-lipid. The particle is approximately 80 nm in diameter and is charge-neutral at physiologic pH. During formulation, the ionizable lipid serves to condense lipid with the anionic RNA during particle formation. When positively charged under increasingly acidic endosomal conditions, the ionizable lipid also mediates the fusion of SNALP with the endosomal membrane enabling release of RNA into the cytoplasm. The PEG-lipid stabilizes the particle and reduces aggregation during formulation, and subsequently provides a neutral hydrophilic exterior that improves pharmacokinetic properties.

[1123] To date, two clinical programs have been initiated using SNALP formulations with RNA. Tekmira Pharmaceuticals recently completed a phase I single-dose study of SNALP-ApoB in adult volunteers with elevated LDL cholesterol. ApoB is predominantly expressed in the liver and jejunum and is essential for the assembly and secretion of VLDL and LDL. Seventeen subjects received a single dose of SNALP-ApoB (dose escalation across 7 dose levels). There was no evidence of liver toxicity (anticipated as the potential dose-limiting toxicity based on preclinical studies). One (of two) subjects at the highest dose experienced flu-like symptoms consistent with immune system stimulation, and the decision was made to conclude the trial.

[1124] Alnylam Pharmaceuticals has similarly advanced ALN-TTR01, which employs the SNALP technology described above and targets hepatocyte production of both mutant and wild-type TTR to treat TTR amyloidosis (ATTR). Three ATTR syndromes have been described: familial amyloidotic polyneuropathy (FAP) and familial amyloidotic cardiomyopathy (FAC)—both caused by autosomal dominant mutations in TTR; and senile systemic amyloidosis (SSA) cause by wildtype TTR. A placebo-controlled, single dose-escalation phase I trial of ALN-TTR01 was recently completed in patients with ATTR. ALN-TTR01 was administered as a 15-minute IV infusion to 31 patients (23 with study drug and 8 with placebo) within a dose range of 0.01 to 1.0 mg/kg (based on siRNA). Treatment was well tolerated with no significant increases in liver function tests. Infusion-related reactions were noted in 3 of 23 patients at ≥0.4 mg/kg; all responded to slowing of the infusion rate and all continued on study. Minimal and transient elevations of serum cytokines IL-6, IP-10 and IL-1ra were noted in two patients at the highest dose of 1 mg/kg (as anticipated from preclinical and NHP studies). Lowering of serum TTR, the expected pharmacodynamics effect of ALN-TTR01, was observed at 1 mg/kg.

[1125] In yet another embodiment, a SNALP may be made by solubilizing a cationic lipid, DSPC, cholesterol and PEG-lipid e.g., in ethanol, e.g., at a molar ratio of 40:10:40:10, respectively (see, Semple et al., Nature Niotechnology, Volume 28 Number 2 Feb. 2010, pp. 172-177). The lipid mixture was added to an aqueous buffer (50 mM citrate, pH 4) with mixing to a final ethanol and lipid concentration of 30% (vol/vol) and 6.1 mg/ml, respectively, and allowed to equilibrate at 22° C. for 2 min before extrusion. The hydrated lipids were extruded through two stacked 80 nm pore-sized filters (Nuclepore) at 22° C. using a Lipex Extruder (Northern Lipids) until a vesicle diameter of 70-90 nm, as determined by dynamic light scattering analysis, was obtained. This generally required 1-3 passes. The siRNA (solubilized in a 50 mM citrate, pH 4 aqueous solution containing 30% ethanol) was added to the pre-equilibrated (35° C.) vesicles at a rate of ˜5 ml/min with mixing. After a final target siRNA/lipid ratio of 0.06 (wt/wt) was reached, the mixture was incubated for a further 30 min at 35° C. to allow vesicle reorganization and encapsulation of the siRNA. The ethanol was then removed and the external buffer replaced with PBS (155 mM NaCl, 3 mM Na2HPO4, 1 mM KH2PO4, pH 7.5) by either dialysis or tangential flow diafiltration. siRNA were encapsulated in SNALP using a controlled step-wise dilution method process. The lipid constituents of KC2-SNALP were DLin-KC2-DMA (cationic lipid), dipalmitoylphosphatidylcholine (DPPC; Avanti Polar Lipids), synthetic cholesterol (Sigma) and PEG-C-DMA used at a molar ratio of 57.1:7.1:34.3:1.4. Upon formation of the loaded particles, SNALP were dialyzed against PBS and filter sterilized through a 0.2 m filter before use. Mean particle sizes were 75-85 nm and 90-95% of the siRNA was encapsulated within the lipid particles. The final siRNA/lipid ratio in formulations used for in vivo testing was ˜0.15 (wt/wt). LNP-siRNA systems containing Factor VII siRNA were diluted to the appropriate concentrations in sterile PBS immediately before use and the formulations were administered intravenously through the lateral tail vein in a total volume of 10 ml/kg. This method and these delivery systems may be extrapolated to the CRISPR Cas system of the present invention.

### Other Lipids

[1126] Other cationic lipids, such as amino lipid 2,2-dilinoleyl-4-dimethylaminoethyl-[1,3]-dioxolane (DLin-KC2-DMA) may be utilized to encapsulate CRISPR Cas or components thereof or nucleic acid molecule(s) coding therefor e.g., similar to SiRNA (see, e.g., Jayaraman, Angew. Chem. Int. Ed. 2012, 51, 8529-8533), and hence may be employed in the practice of the invention. A preformed vesicle with the following lipid composition may be contemplated: amino lipid, distearoylphosphatidylcholine (DSPC), cholesterol and (R)-2,3-bis(octadecyloxy) propyl-1-(methoxy poly(ethylene glycol)2000)propylcarbamate (PEG-lipid) in the molar ratio 40/10/40/10, respectively, and a FVII siRNA/total lipid ratio of approximately 0.05 (w/w). To ensure a narrow particle size distribution in the range of 70-90 nm and a low polydispersity index of 0.11+0.04 (n=56), the particles may be extruded up to three times through 80 nm membranes prior to adding the guide RNA. Particles containing the highly potent amino lipid 16 may be used, in which the molar ratio of the four lipid components 16, DSPC, cholesterol and PEG-lipid (50/10/38.5/1.5) which may be further optimized to enhance in vivo activity.

[1127] Michael S D Kormann et al. (“Expression of therapeutic proteins after delivery of chemically modified mRNA in mice: Nature Biotechnology, Volume: 29, Pages: 154-157 (2011)) describes the use of lipid envelopes to deliver RNA. Use of lipid envelopes is also preferred in the present invention.

[1128] In another embodiment, lipids may be formulated with the CRISPR Cas system of the present invention or component(s) thereof or nucleic acid molecule(s) coding therefor to form lipid nanoparticles (LNPs). Lipids include, but are not limited to, DLin-KC2-DMA4, C12-200 and colipids disteroylphosphatidyl choline, cholesterol, and PEG-DMG may be formulated with CRISPR Cas instead of siRNA (see, e.g., Novobrantseva, Molecular Therapy-Nucleic Acids (2012) 1, e4; doi:10.1038/mtna.2011.3) using a spontaneous vesicle formation procedure. The component molar ratio may be about 50/10/38.5/1.5 (DLin-KC2-DMA or C12-200/di steroylphosphatidyl choline/cholesterol/PEG-DMG). The final lipid:siRNA weight ratio may be ˜12:1 and 9:1 in the case of DLin-KC2-DMA and C12-200 lipid nanoparticles (LNPs), respectively. The formulations may have mean particle diameters of ˜80 nm with >90% entrapment efficiency. A 3 mg/kg dose may be contemplated.

[1129] Tekmira has a portfolio of approximately 95 patent families, in the U.S. and abroad, that are directed to various aspects of LNPs and LNP formulations (see, e.g., U.S. Pat. Nos. 7,982,027; 7,799,565; 8,058,069; 8,283,333; 7,901,708; 7,745,651; 7,803,397; 8,101,741; 8,188,263; 7,915,399; 8,236,943 and 7,838,658 and European Pat. Nos 1766035; 1519714; 1781593 and 1664316), all of which may be used and/or adapted to the present invention.

[1130] The CRISPR Cas system or components thereof or nucleic acid molecule(s) coding therefor may be delivered encapsulated in PLGA Microspheres such as that further described in US published applications 20130252281 and 20130245107 and 20130244279 (assigned to Moderna Therapeutics) which relate to aspects of formulation of compositions comprising modified nucleic acid molecules which may encode a protein, a protein precursor, or a partially or fully processed form of the protein or a protein precursor. The formulation may have a molar ratio 50:10:38.5:1.5-3.0 (cationic lipid:fusogenic lipid:cholesterol:PEG lipid). The PEG lipid may be selected from, but is not limited to PEG-c-DOMG, PEG-DMG. The fusogenic lipid may be DSPC. See also, Schrum et al., Delivery and Formulation of Engineered Nucleic Acids, US published application 20120251618.

[1131] Nanomerics' technology addresses bioavailability challenges for a broad range of therapeutics, including low molecular weight hydrophobic drugs, peptides, and nucleic acid based therapeutics (plasmid, siRNA, miRNA). Specific administration routes for which the technology has demonstrated clear advantages include the oral route, transport across the blood-brain-barrier, delivery to solid tumours, as well as to the eye. See, e.g., Mazza et al., 2013, ACS Nano. 2013 Feb. 26; 7(2):1016-26; Uchegbu and Siew, 2013, J Pharm Sci. 102(2):305-10 and Lalatsa et al., 2012, J Control Release. 2012 Jul. 20; 161(2):523-36.

[1132] US Patent Publication No. 20050019923 describes cationic dendrimers for delivering bioactive molecules, such as polynucleotide molecules, peptides and polypeptides and/or pharmaceutical agents, to a mammalian body. The dendrimers are suitable for targeting the delivery of the bioactive molecules to, for example, the liver, spleen, lung, kidney or heart (or even the brain). Dendrimers are synthetic 3-dimensional macromolecules that are prepared in a step-wise fashion from simple branched monomer units, the nature and functionality of which can be easily controlled and varied. Dendrimers are synthesised from the repeated addition of building blocks to a multifunctional core (divergent approach to synthesis), or towards a multifunctional core (convergent approach to synthesis) and each addition of a 3-dimensional shell of building blocks leads to the formation of a higher generation of the dendrimers. Polypropylenimine dendrimers start from a diaminobutane core to which is added twice the number of amino groups by a double Michael addition of acrylonitrile to the primary amines followed by the hydrogenation of the nitriles. This results in a doubling of the amino groups. Polypropylenimine dendrimers contain 100% protonable nitrogens and up to 64 terminal amino groups (generation 5, DAB 64). Protonable groups are usually amine groups which are able to accept protons at neutral pH. The use of dendrimers as gene delivery agents has largely focused on the use of the polyamidoamine. and phosphorous containing compounds with a mixture of amine/amide or N—P(O₂)S as the conjugating units respectively with no work being reported on the use of the lower generation polypropylenimine dendrimers for gene delivery. Polypropylenimine dendrimers have also been studied as pH sensitive controlled release systems for drug delivery and for their encapsulation of guest molecules when chemically modified by peripheral amino acid groups. The cytotoxicity and interaction of polypropylenimine dendrimers with DNA as well as the transfection efficacy of DAB 64 has also been studied.

[1133] US Patent Publication No. 20050019923 is based upon the observation that, contrary to earlier reports, cationic dendrimers, such as polypropylenimine dendrimers, display suitable properties, such as specific targeting and low toxicity, for use in the targeted delivery of bioactive molecules, such as genetic material. In addition, derivatives of the cationic dendrimer also display suitable properties for the targeted delivery of bioactive molecules. See also, Bioactive Polymers, US published application 20080267903, which discloses “Various polymers, including cationic polyamine polymers and dendrimeric polymers, are shown to possess anti-proliferative activity, and may therefore be useful for treatment of disorders characterised by undesirable cellular proliferation such as neoplasms and tumours, inflammatory disorders (including autoimmune disorders), psoriasis and atherosclerosis. The polymers may be used alone as active agents, or as delivery vehicles for other therapeutic agents, such as drug molecules or nucleic acids for gene therapy. In such cases, the polymers' own intrinsic anti-tumour activity may complement the activity of the agent to be delivered.” The disclosures of these patent publications may be employed in conjunction with herein teachings for delivery of CRISPR Cas system(s) or component(s) thereof or nucleic acid molecule(s) coding therefor.

[1134] Additional delivery system formulations and particle types are also contemplated. In one embodiment, plasmids containing Cas9 and gRNA sequences can be delivered in a formulation that includes polyethyleneimine (PEI), specifically branched PEI 25 kD. See, e.g. Ryu et al., “Effective PEI-mediated delivery of CRISPR-Cas9 complex for targeted gene therapy” Nanomedicine. 2018 October; 14(7):2095-2102. In another embodiment, plasmids can be delivered in a formulation in which the plasmids are complexed with stearyl polyethylenimine as the core of human serum albumin nanoparticles noncovalently bound to CRISPR/Cas9 plasmids or siRNA for disrupting or silencing PD-L1 expression for immunotherapy. See, e.g. Cheng et al., Int J Nanomedicine. 2018 Nov. 2; 13:7079-7094. 2018. In another embodiment, plasmids containing Cas9 and gRNA sequences can be delivered in a hybrid nanoparticle produced by encapsulating the plasmid in an exosome, which is then fused with a liposome, to allow uptake by cell types that are not efficiently transfected using liposomes. See, e.g. Lin et al., “Exosome-Liposome Hybrid Nanoparticles Deliver CRISPR/Cas9 System in MSCs” Adv Sci (Weinh). 2018 April; 5(4): 1700611. In another embodiment, a Cas9 plasmid can be delivered in a formulation that includes a novel fluorinated acid-labile branched hydroxyl-rich polycation (ARP-F). See, e.g. Qi et al., “Fluorinated Acid-Labile Branched Hydroxyl-Rich Nanosystems for Flexible and Robust Delivery of Plasmids.” Small. 2018 October; 14(42):e1803061.

### Supercharged Proteins

[1135] Supercharged proteins are a class of engineered or naturally occurring proteins with unusually high positive or negative net theoretical charge and may be employed in delivery of CRISPR Cas system(s) or component(s) thereof or nucleic acid molecule(s) coding therefor. Both supernegatively and superpositively charged proteins exhibit a remarkable ability to withstand thermally or chemically induced aggregation. Superpositively charged proteins are also able to penetrate mammalian cells. Associating cargo with these proteins, such as plasmid DNA, RNA, or other proteins, can enable the functional delivery of these macromolecules into mammalian cells both in vitro and in vivo. David Liu's lab reported the creation and characterization of supercharged proteins in 2007 (Lawrence et al., 2007, Journal of the American Chemical Society 129, 10110-10112).

[1136] The nonviral delivery of RNA and plasmid DNA into mammalian cells are valuable both for research and therapeutic applications (Akinc et al., 2010, Nat. Biotech. 26, 561-569). Purified +36 GFP protein (or other superpositively charged protein) is mixed with RNAs in the appropriate serum-free media and allowed to complex prior addition to cells. Inclusion of serum at this stage inhibits formation of the supercharged protein-RNA complexes and reduces the effectiveness of the treatment. The following protocol has been found to be effective for a variety of cell lines (McNaughton et al., 2009, Proc. Natl. Acad. Sci. USA 106, 6111-6116) (However, pilot experiments varying the dose of protein and RNA should be performed to optimize the procedure for specific cell lines):

[1137] (1) One day before treatment, plate 1×10⁵ cells per well in a 48-well plate.

[1138] (2) On the day of treatment, dilute purified +36 GFP protein in serumfree media to a final concentration 200 nM. Add RNA to a final concentration of 50 nM. Vortex to mix and incubate at room temperature for 10 min.

[1139] (3) During incubation, aspirate media from cells and wash once with PBS.

[1140] (4) Following incubation of +36 GFP and RNA, add the protein-RNA complexes to cells.

[1141] (5) Incubate cells with complexes at 37° C. for 4h.

[1142] (6) Following incubation, aspirate the media and wash three times with 20 U/mL heparin PBS. Incubate cells with serum-containing media for a further 48h or longer depending upon the assay for activity.

[1143] (7) Analyze cells by immunoblot, qPCR, phenotypic assay, or other appropriate method.

[1144] David Liu's lab has further found +36 GFP to be an effective plasmid delivery reagent in a range of cells. As plasmid DNA is a larger cargo than siRNA, proportionately more +36 GFP protein is required to effectively complex plasmids. For effective plasmid delivery Applicants have developed a variant of +36 GFP bearing a C-terminal HA2 peptide tag, a known endosome-disrupting peptide derived from the influenza virus hemagglutinin protein. The following protocol has been effective in a variety of cells, but as above it is advised that plasmid DNA and supercharged protein doses be optimized for specific cell lines and delivery applications:

[1145] (1) One day before treatment, plate 1×10⁵ per well in a 48-well plate. (2) On the day of treatment, dilute purified [symbol] 36 GFP protein in serumfree media to a final concentration 2 mM. Add 1 mg of plasmid DNA. Vortex to mix and incubate at room temperature for 10 min.

[1146] (3) During incubation, aspirate media from cells and wash once with PBS.

[1147] (4) Following incubation of [symbol] 36 GFP and plasmid DNA, gently add the protein-DNA complexes to cells.

[1148] (5) Incubate cells with complexes at 37 C for 4h.

[1149] (6) Following incubation, aspirate the media and wash with PBS. Incubate cells in serum-containing media and incubate for a further 24-48h.

[1150] (7) Analyze plasmid delivery (e.g., by plasmid-driven gene expression) as appropriate.

[1151] See also, e.g., McNaughton et al., Proc. Natl. Acad. Sci. USA 106, 6111-6116 (2009); Cronican et al., ACS Chemical Biology 5, 747-752 (2010); Cronican et al., Chemistry & Biology 18, 833-838 (2011); Thompson et al., Methods in Enzymology 503, 293-319 (2012); Thompson, D. B., et al., Chemistry & Biology 19 (7), 831-843 (2012). The methods of the super charged proteins may be used and/or adapted for delivery of the CRISPR Cas system of the present invention. These systems of Dr. Lui and documents herein in conjunction with herein teaching can be employed in the delivery of CRISPR Cas system(s) or component(s) thereof or nucleic acid molecule(s) coding therefor.

### Cell Penetrating Peptides (CPPs)

[1152] In yet another embodiment, cell penetrating peptides (CPPs) are contemplated for the delivery of the CRISPR Cas system. CPPs are short peptides that facilitate cellular uptake of various molecular cargo (from nanosize particles to small chemical molecules and large fragments of DNA). The term “cargo” as used herein includes but is not limited to the group consisting of therapeutic agents, diagnostic probes, peptides, nucleic acids, antisense oligonucleotides, plasmids, proteins, particles, including nanoparticles, liposomes, chromophores, small molecules and radioactive materials. In aspects of the invention, the cargo may also comprise any component of the CRISPR Cas system or the entire functional CRISPR Cas system. Aspects of the present invention further provide methods for delivering a desired cargo into a subject comprising: (a) preparing a complex comprising the cell penetrating peptide of the present invention and a desired cargo, and (b) orally, intraarticularly, intraperitoneally, intrathecally, intrarterially, intranasally, intraparenchymally, subcutaneously, intramuscularly, intravenously, dermally, intrarectally, or topically administering the complex to a subject. The cargo is associated with the peptides either through chemical linkage via covalent bonds or through non-covalent interactions.

[1153] The function of the CPPs are to deliver the cargo into cells, a process that commonly occurs through endocytosis with the cargo delivered to the endosomes of living mammalian cells. Cell-penetrating peptides are of different sizes, amino acid sequences, and charges but all CPPs have one distinct characteristic, which is the ability to translocate the plasma membrane and facilitate the delivery of various molecular cargoes to the cytoplasm or an organelle. CPP translocation may be classified into three main entry mechanisms: direct penetration in the membrane, endocytosis-mediated entry, and translocation through the formation of a transitory structure. CPPs have found numerous applications in medicine as drug delivery agents in the treatment of different diseases including cancer and virus inhibitors, as well as contrast agents for cell labeling. Examples of the latter include acting as a carrier for GFP, MRI contrast agents, or quantum dots. CPPs hold great potential as in vitro and in vivo delivery vectors for use in research and medicine. CPPs typically have an amino acid composition that either contains a high relative abundance of positively charged amino acids such as lysine or arginine or has sequences that contain an alternating pattern of polar/charged amino acids and non-polar, hydrophobic amino acids. These two types of structures are referred to as polycationic or amphipathic, respectively. A third class of CPPs are the hydrophobic peptides, containing only apolar residues, with low net charge or have hydrophobic amino acid groups that are crucial for cellular uptake. One of the initial CPPs discovered was the trans-activating transcriptional activator (Tat) from Human Immunodeficiency Virus 1 (HIV-1) which was found to be efficiently taken up from the surrounding media by numerous cell types in culture. Since then, the number of known CPPs has expanded considerably and small molecule synthetic analogues with more effective protein transduction properties have been generated. CPPs include but are not limited to Penetratin, Tat (48-60), Transportan, and (R-AhX-R4) (Ahx=aminohexanoyl).

[1154] U.S. Pat. No. 8,372,951, provides a CPP derived from eosinophil cationic protein (ECP) which exhibits highly cell-penetrating efficiency and low toxicity. Aspects of delivering the CPP with its cargo into a vertebrate subject are also provided. Further aspects of CPPs and their delivery are described in U.S. Pat. Nos. 8,575,305; 8,614,194 and 8,044,019. CPPs can be used to deliver the CRISPR-Cas system or components thereof. That CPPs can be employed to deliver the CRISPR-Cas system or components thereof is also provided in the manuscript “Gene disruption by cell-penetrating peptide-mediated delivery of Cas9 protein and guide RNA”, by Suresh Ramakrishna, Abu-Bonsrah Kwaku Dad, Jagadish Beloor, et al. Genome Res. 2014 Apr. 2. [Epub ahead of print], incorporated by reference in its entirety, wherein it is demonstrated that treatment with CPP-conjugated recombinant Cas9 protein and CPP-complexed guide RNAs lead to endogenous gene disruptions in human cell lines. In the paper the Cas9 protein was conjugated to CPP via a thioether bond, whereas the guide RNA was complexed with CPP, forming condensed, positively charged particles. It was shown that simultaneous and sequential treatment of human cells, including embryonic stem cells, dermal fibroblasts, HEK293T cells, HeLa cells, and embryonic carcinoma cells, with the modified Cas9 and guide RNA led to efficient gene disruptions with reduced off-target mutations relative to plasmid transfections.

### Implantable Devices

[1155] In another embodiment, implantable devices are also contemplated for delivery of the CRISPR Cas system or component(s) thereof or nucleic acid molecule(s) coding therefor. For example, US Patent Publication 20110195123 discloses an implantable medical device which elutes a drug locally and in prolonged period is provided, including several types of such a device, the treatment modes of implementation and methods of implantation. The device comprising of polymeric substrate, such as a matrix for example, that is used as the device body, and drugs, and in some cases additional scaffolding materials, such as metals or additional polymers, and materials to enhance visibility and imaging. An implantable delivery device can be advantageous in providing release locally and over a prolonged period, where drug is released directly to the extracellular matrix (ECM) of the diseased area such as tumor, inflammation, degeneration or for symptomatic objectives, or to injured smooth muscle cells, or for prevention. One kind of drug is RNA, as disclosed above, and this system may be used/and or adapted to the CRISPR Cas system of the present invention. The modes of implantation in some embodiments are existing implantation procedures that are developed and used today for other treatments, including brachytherapy and needle biopsy. In such cases the dimensions of the new implant described in this invention are similar to the original implant. Typically a few devices are implanted during the same treatment procedure.

[1156] US Patent Publication 20110195123, provides a drug delivery implantable or insertable system, including systems applicable to a cavity such as the abdominal cavity and/or any other type of administration in which the drug delivery system is not anchored or attached, comprising a biostable and/or degradable and/or bioabsorbable polymeric substrate, which may for example optionally be a matrix. It should be noted that the term “insertion” also includes implantation. The drug delivery system is preferably implemented as a “Loder” as described in US Patent Publication 20110195123.

[1157] The polymer or plurality of polymers are biocompatible, incorporating an agent and/or plurality of agents, enabling the release of agent at a controlled rate, wherein the total volume of the polymeric substrate, such as a matrix for example, in some embodiments is optionally and preferably no greater than a maximum volume that permits a therapeutic level of the agent to be reached. As a non-limiting example, such a volume is preferably within the range of 0.1 m³ to 1000 mm³, as required by the volume for the agent load. The Loder may optionally be larger, for example when incorporated with a device whose size is determined by functionality, for example and without limitation, a knee joint, an intra-uterine or cervical ring and the like.

[1158] The drug delivery system (for delivering the composition) is designed in some embodiments to preferably employ degradable polymers, wherein the main release mechanism is bulk erosion; or in some embodiments, non degradable, or slowly degraded polymers are used, wherein the main release mechanism is diffusion rather than bulk erosion, so that the outer part functions as membrane, and its internal part functions as a drug reservoir, which practically is not affected by the surroundings for an extended period (for example from about a week to about a few months). Combinations of different polymers with different release mechanisms may also optionally be used. The concentration gradient at the surface is preferably maintained effectively constant during a significant period of the total drug releasing period, and therefore the diffusion rate is effectively constant (termed “zero mode” diffusion). By the term “constant” it is meant a diffusion rate that is preferably maintained above the lower threshold of therapeutic effectiveness, but which may still optionally feature an initial burst and/or may fluctuate, for example increasing and decreasing to a certain degree. The diffusion rate is preferably so maintained for a prolonged period, and it can be considered constant to a certain level to optimize the therapeutically effective period, for example the effective silencing period.

[1159] The drug delivery system optionally and preferably is designed to shield the nucleotide based therapeutic agent from degradation, whether chemical in nature or due to attack from enzymes and other factors in the body of the subject.

[1160] The drug delivery system of US Patent Publication 20110195123 is optionally associated with sensing and/or activation appliances that are operated at and/or after implantation of the device, by non and/or minimally invasive methods of activation and/or acceleration/deceleration, for example optionally including but not limited to thermal heating and cooling, laser beams, and ultrasonic, including focused ultrasound and/or RF (radiofrequency) methods or devices.

[1161] According to some embodiments of US Patent Publication 20110195123, the site for local delivery may optionally include target sites characterized by high abnormal proliferation of cells, and suppressed apoptosis, including tumors, active and or chronic inflammation and infection including autoimmune diseases states, degenerating tissue including muscle and nervous tissue, chronic pain, degenerative sites, and location of bone fractures and other wound locations for enhancement of regeneration of tissue, and injured cardiac, smooth and striated muscle.

[1162] The site for implantation of the composition, or target site, preferably features a radius, area and/or volume that is sufficiently small for targeted local delivery. For example, the target site optionally has a diameter in a range of from about 0.1 mm to about 5 cm.

[1163] The location of the target site is preferably selected for maximum therapeutic efficacy. For example, the composition of the drug delivery system (optionally with a device for implantation as described above) is optionally and preferably implanted within or in the proximity of a tumor environment, or the blood supply associated thereof.

[1164] For example the composition (optionally with the device) is optionally implanted within or in the proximity to pancreas, prostate, breast, liver, via the nipple, within the vascular system and so forth.

[1165] The target location is optionally selected from the group comprising, consisting essentially of, or consisting of (as non-limiting examples only, as optionally any site within the body may be suitable for implanting a Loder): 1. brain at degenerative sites like in Parkinson or Alzheimer disease at the basal ganglia, white and gray matter; 2. spine as in the case of amyotrophic lateral sclerosis (ALS); 3. uterine cervix to prevent HPV infection; 4. active and chronic inflammatory joints; 5. dermis as in the case of psoriasis; 6. sympathetic and sensoric nervous sites for analgesic effect; 7. Intra osseous implantation; 8. acute and chronic infection sites; 9. Intra vaginal; 10. Inner ear—auditory system, labyrinth of the inner ear, vestibular system; 11. Intra tracheal; 12. Intra-cardiac; coronary, epicardiac; 13. urinary bladder; 14. biliary system; 15. parenchymal tissue including and not limited to the kidney, liver, spleen; 16. lymph nodes; 17. salivary glands; 18. dental gums; 19. Intra-articular (into joints); 20. Intra-ocular; 21. Brain tissue; 22. Brain ventricles; 23. Cavities, including abdominal cavity (for example but without limitation, for ovary cancer); 24. Intra esophageal and 25. Intra rectal.

[1166] Optionally insertion of the system (for example a device containing the composition) is associated with injection of material to the ECM at the target site and the vicinity of that site to affect local pH and/or temperature and/or other biological factors affecting the diffusion of the drug and/or drug kinetics in the ECM, of the target site and the vicinity of such a site.

[1167] Optionally, according to some embodiments, the release of said agent could be associated with sensing and/or activation appliances that are operated prior and/or at and/or after insertion, by non and/or minimally invasive and/or else methods of activation and/or acceleration/deceleration, including laser beam, radiation, thermal heating and cooling, and ultrasonic, including focused ultrasound and/or RF (radiofrequency) methods or devices, and chemical activators.

[1168] According to other embodiments of US Patent Publication 20110195123, the drug preferably comprises a RNA, for example for localized cancer cases in breast, pancreas, brain, kidney, bladder, lung, and prostate as described below. Although exemplified with RNAi, many drugs are applicable to be encapsulated in Loder, and can be used in association with this invention, as long as such drugs can be encapsulated with the Loder substrate, such as a matrix for example, and this system may be used and/or adapted to deliver the CRISPR Cas system of the present invention.

[1169] As another example of a specific application, neuro and muscular degenerative diseases develop due to abnormal gene expression. Local delivery of RNAs may have therapeutic properties for interfering with such abnormal gene expression. Local delivery of anti apoptotic, anti inflammatory and anti degenerative drugs including small drugs and macromolecules may also optionally be therapeutic. In such cases the Loder is applied for prolonged release at constant rate and/or through a dedicated device that is implanted separately. All of this may be used and/or adapted to the CRISPR Cas system of the present invention.

[1170] As yet another example of a specific application, psychiatric and cognitive disorders are treated with gene modifiers. Gene knockdown is a treatment option. Loders locally delivering agents to central nervous system sites are therapeutic options for psychiatric and cognitive disorders including but not limited to psychosis, bi-polar diseases, neurotic disorders and behavioral maladies. The Loders could also deliver locally drugs including small drugs and macromolecules upon implantation at specific brain sites. All of this may be used and/or adapted to the CRISPR Cas system of the present invention.

[1171] As another example of a specific application, silencing of innate and/or adaptive immune mediators at local sites enables the prevention of organ transplant rejection. Local delivery of RNAs and immunomodulating reagents with the Loder implanted into the transplanted organ and/or the implanted site renders local immune suppression by repelling immune cells such as CD8 activated against the transplanted organ. All of this may be used/and or adapted to the CRISPR Cas system of the present invention.

[1172] As another example of a specific application, vascular growth factors including VEGFs and angiogenin and others are essential for neovascularization. Local delivery of the factors, peptides, peptidomimetics, or suppressing their repressors is an important therapeutic modality; silencing the repressors and local delivery of the factors, peptides, macromolecules and small drugs stimulating angiogenesis with the Loder is therapeutic for peripheral, systemic and cardiac vascular disease.

[1173] The method of insertion, such as implantation, may optionally already be used for other types of tissue implantation and/or for insertions and/or for sampling tissues, optionally without modifications, or alternatively optionally only with non-major modifications in such methods. Such methods optionally include but are not limited to brachytherapy methods, biopsy, endoscopy with and/or without ultrasound, such as ERCP, stereotactic methods into the brain tissue, Laparoscopy, including implantation with a laparoscope into joints, abdominal organs, the bladder wall and body cavities.

[1174] Implantable devices may also include cells, such as epidermal progenitor cells that have been edited or modified to express the CRISPR-Cas systems disclosed herein and embedded with an implantable device, such as a patch. See. Yue et al. “Engineered Epidermal Progenitor Cells Can Correct Diet-Induced Obesity and Diabetes” Cell Stem Cell (2017) 21(2):256-263.

[1175] Implantable device technology herein discussed can be employed with herein teachings and hence by this disclosure and the knowledge in the art, CRISPR-Cas system or components thereof or nucleic acid molecules thereof or encoding or providing components may be delivered via an implantable device.

### Aerosol Delivery

[1176] Subjects treated for a lung disease may for example receive pharmaceutically effective amount of aerosolized AAV vector system per lung endobronchially delivered while spontaneously breathing. As such, aerosolized delivery is preferred for AAV delivery in general. An adenovirus or an AAV particle may be used for delivery. Suitable gene constructs, each operably linked to one or more regulatory sequences, may be cloned into the delivery vector.

### Hybrid Viral Capsid Delivery Systems

[1177] In one aspect, the invention provides a particle delivery system comprising a hybrid virus capsid protein or hybrid viral outer protein, wherein the hybrid virus capsid or outer protein comprises a virus capsid or outer protein attached to at least a portion of a non-capsid protein or peptide. The genetic material of a virus is stored within a viral structure called the capsid. The capsid of certain viruses are enclosed in a membrane called the viral envelope. The viral envelope is made up of a lipid bilayer embedded with viral proteins including viral glycoproteins. As used herein, an “envelope protein” or “outer protein” means a protein exposed at the surface of a viral particle that is not a capsid protein. For example envelope or outer proteins typically comprise proteins embedded in the envelope of the virus. Non-limiting examples of outer or envelope proteins include, without limit, gp41 and gp120 of HIV, hemagglutinin, neuraminidase and M2 proteins of influenza virus.

[1178] In one example embodiment of the delivery system, the non-capsid protein or peptide has a molecular weight of up to a megadalton, or has a molecular weight in the range of 110 to 160 kDa, 160 to 200 kDa, 200 to 250 kDa, 250 to 300 kDa, 300 to 400 kDa, or 400 to 500 kDa, the non-capsid protein or peptide comprises a CRISPR protein.

[1179] The present application provides a vector for delivering an effector protein and at least one CRISPR guide RNA to a cell comprising a minimal promoter operably linked to a polynucleotide sequence encoding the effector protein and a second minimal promoter operably linked to a polynucleotide sequence encoding at least one guide RNA, wherein the length of the vector sequence comprising the minimal promoters and polynucleotide sequences is less than 4.4 Kb. In an embodiment, the virus is an adeno-associated virus (AAV) or an adenovirus. In another embodiment, the effector protein is a CRISPR anzyme. In a further embodiment, the CRISPR enzyme is SaCas9, Cpf1, Cas13b or C2c2.

[1180] In a related aspect, the invention provides a lentiviral vector for delivering an effector protein and at least one CRISPR guide RNA to a cell comprising a promoter operably linked to a polynucleotide sequence encoding Cas and a second promoter operably linked to a polynucleotide sequence encoding at least one guide RNA, wherein the polynucleotide sequences are in reverse orientation.

[1181] In an embodiment of the delivery system, the virus is lentivirus or murine leukemia virus (MuMLV).

[1182] In an embodiment of the delivery system, the virus is an Adenoviridae or a Parvoviridae or a retrovirus or a Rhabdoviridae or an enveloped virus having a glycoprotein protein (G protein).

[1183] In an embodiment of the delivery system, the virus is VSV or rabies virus.

[1184] In an embodiment of the delivery system, the capsid or outer protein comprises a capsid protein having VP1, VP2 or VP3.

[1185] In an embodiment of the delivery system, the capsid protein is VP3, and the non-capsid protein is inserted into or attached to VP3 loop 3 or loop 6.

[1186] In an embodiment of the delivery system, the virus is delivered to the interior of a cell.

[1187] In an embodiment of the delivery system, the capsid or outer protein and the non-capsid protein can dissociate after delivery into a cell.

[1188] In an embodiment of the delivery system, the capsid or outer protein is attached to the protein by a linker.

[1189] In an embodiment of the delivery system, the linker comprises amino acids.

[1190] In an embodiment of the delivery system, the linker is a chemical linker.

[1191] In an embodiment of the delivery system, the linker is cleavable.

[1192] In an embodiment of the delivery system, the linker is biodegradable.

[1193] In an embodiment of the delivery system, the linker comprises (GGGGS)1-3, ENLYFQG, or a disulfide.

[1194] In an embodiment, the delivery system comprises a protease or nucleic acid molecule(s) encoding a protease that is expressed, said protease being capable of cleaving the linker, whereby there can be cleavage of the linker. In an embodiment of the invention, a protease is delivered with a particle component of the system, for example packaged, mixed with, or enclosed by lipid and or capsid. Entry of the particle into a cell is thereby accompanied or followed by cleavage and dissociation of payload from particle. In certain embodiments, an expressible nucleic acid encoding a protease is delivered, whereby at entry or following entry of the particle into a cell, there is protease expression, linker cleavage, and dissociation of payload from capsid. In certain embodiments, dissociation of payload occurs with viral replication. In certain embodiments, dissociation of payload occurs in the absence of productive virus replication.

[1195] In an embodiment of the delivery system, each terminus of a CRISPR protein is attached to the capsid or outer protein by a linker.

[1196] In an embodiment of the delivery system, the non-capsid protein is attached to the exterior portion of the capsid or outer protein.

[1197] In an embodiment of the delivery system, the non-capsid protein is attached to the interior portion of the capsid or outer protein.

[1198] In an embodiment of the delivery system, the capsid or outer protein and the non-capsid protein are a fusion protein.

[1199] In an embodiment of the delivery system, the non-capsid protein is encapsulated by the capsid or outer protein.

[1200] In an embodiment of the delivery system, the non-capsid protein is attached to a component of the capsid protein or a component of the outer protein prior to formation of the capsid or the outer protein.

[1201] In an embodiment of the delivery system, the protein is attached to the capsid or outer protein after formation of the capsid or outer protein.

[1202] In an embodiment, the delivery system comprises a targeting moiety, such as active targeting of a lipid entity of the invention, e.g., lipid particle or nanoparticle or liposome or lipid bylayer of the invention comprising a targeting moiety for active targeting.

[1203] With regard to targeting moieties, mention is made of Deshpande et al, “Current trends in the use of liposomes for tumor targeting,” Nanomedicine (Lond). 8(9), doi:10.2217/nnm. 13.118 (2013), and the documents it cites, all of which are incorporated herein by reference. Mention is also made of WO/2016/027264, and the documents it cites, all of which are incorporated herein by reference. And mention is made of Lorenzer et al, “Going beyond the liver: Progress and challenges of targeted delivery of siRNA therapeutics,” Journal of Controlled Release, 203: 1-15 (2015), and the documents it cites, all of which are incorporated herein by reference.

[1204] An actively targeting lipid particle or nanoparticle or liposome or lipid bylayer delivery system (generally as to embodiments of the invention, “lipid entity of the invention” delivery systems) are prepared by conjugating targeting moieties, including small molecule ligands, peptides and monoclonal antibodies, on the lipid or liposomal surface; for example, certain receptors, such as folate and transferrin (Tf) receptors (TfR), are overexpressed on many cancer cells and have been used to make liposomes tumor cell specific. Liposomes that accumulate in the tumor microenvironment can be subsequently endocytosed into the cells by interacting with specific cell surface receptors. To efficiently target liposomes to cells, such as cancer cells, it is useful that the targeting moiety have an affinity for a cell surface receptor and to link the targeting moiety in sufficient quantities to have optimum affinity for the cell surface receptors; and determining these aspects are within the ambit of the skilled artisan. In the field of active targeting, there are a number of cell-, e.g., tumor-, specific targeting ligands.

[1205] Also as to active targeting, with regard to targeting cell surface receptors such as cancer cell surface receptors, targeting ligands on liposomes can provide attachment of liposomes to cells, e.g., vascular cells, via a noninternalizing epitope; and, this can increase the extracellular concentration of that which is being delivered, thereby increasing the amount delivered to the target cells. A strategy to target cell surface receptors, such as cell surface receptors on cancer cells, such as overexpressed cell surface receptors on cancer cells, is to use receptor-specific ligands or antibodies. Many cancer cell types display upregulation of tumor-specific receptors. For example, TfRs and folate receptors (FRs) are greatly overexpressed by many tumor cell types in response to their increased metabolic demand. Folic acid can be used as a targeting ligand for specialized delivery owing to its ease of conjugation to nanocarriers, its high affinity for FRs and the relatively low frequency of FRs, in normal tissues as compared with their overexpression in activated macrophages and cancer cells, e.g., certain ovarian, breast, lung, colon, kidney and brain tumors. Overexpression of FR on macrophages is an indication of inflammatory diseases, such as psoriasis, Crohn's disease, rheumatoid arthritis and atherosclerosis; accordingly, folate-mediated targeting of the invention can also be used for studying, addressing or treating inflammatory disorders, as well as cancers. Folate-linked lipid particles or nanoparticles or liposomes or lipid bylayers of the invention (“lipid entity of the invention”) deliver their cargo intracellularly through receptor-mediated endocytosis. Intracellular trafficking can be directed to acidic compartments that facilitate cargo release, and, most importantly, release of the cargo can be altered or delayed until it reaches the cytoplasm or vicinity of target organelles. Delivery of cargo using a lipid entity of the invention having a targeting moiety, such as a folate-linked lipid entity of the invention, can be superior to nontargeted lipid entity of the invention. The attachment of folate directly to the lipid head groups may not be favorable for intracellular delivery of folate-conjugated lipid entity of the invention, since they may not bind as efficiently to cells as folate attached to the lipid entity of the invention surface by a spacer, which may can enter cancer cells more efficiently. A lipid entity of the invention coupled to folate can be used for the delivery of complexes of lipid, e.g., liposome, e.g., anionic liposome and virus or capsid or envelope or virus outer protein, such as those herein discussed such as adenovirous or AAV. Tf is a monomeric serum glycoprotein of approximately 80 KDa involved in the transport of iron throughout the body. Tf binds to the TfR and translocates into cells via receptor-mediated endocytosis. The expression of TfR is can be higher in certain cells, such as tumor cells (as compared with normal cells and is associated with the increased iron demand in rapidly proliferating cancer cells. Accordingly, the invention comprehends a TfR-targeted lipid entity of the invention, e.g., as to liver cells, liver cancer, breast cells such as breast cancer cells, colon such as colon cancer cells, ovarian cells such as ovarian cancer cells, head, neck and lung cells, such as head, neck and non-small-cell lung cancer cells, cells of the mouth such as oral tumor cells.

[1206] Also as to active targeting, a lipid entity of the invention can be multifunctional, i.e., employ more than one targeting moiety such as CPP, along with Tf; a bifunctional system; e.g., a combination of Tf and poly-L-arginine which can provide transport across the endothelium of the blood-brain barrier. EGFR, is a tyrosine kinase receptor belonging to the ErbB family of receptors that mediates cell growth, differentiation and repair in cells, especially non-cancerous cells, but EGF is overexpressed in certain cells such as many solid tumors, including colorectal, non-small-cell lung cancer, squamous cell carcinoma of the ovary, kidney, head, pancreas, neck and prostate, and especially breast cancer. The invention comprehends EGFR-targeted monoclonal antibody(ies) linked to a lipid entity of the invention. HER-2 is often overexpressed in patients with breast cancer, and is also associated with lung, bladder, prostate, brain and stomach cancers. HER-2, encoded by the ERBB2 gene. The invention comprehends a HER-2-targeting lipid entity of the invention, e.g., an anti-HER-2-antibody (or binding fragment thereof)-lipid entity of the invention, a HER-2-targeting-PEGylated lipid entity of the invention (e.g., having an anti-HER-2-antibody or binding fragment thereof), a HER-2-targeting-maleimide-PEG polymer-lipid entity of the invention (e.g., having an anti-HER-2-antibody or binding fragment thereof). Upon cellular association, the receptor-antibody complex can be internalized by formation of an endosome for delivery to the cytoplasm. With respect to receptor-mediated targeting, the skilled artisan takes into consideration ligand/target affinity and the quantity of receptors on the cell surface, and that PEGylation can act as a barrier against interaction with receptors. The use of antibody-lipid entity of the invention targeting can be advantageous. Multivalent presentation of targeting moieties can also increase the uptake and signaling properties of antibody fragments. In practice of the invention, the skilled person takes into account ligand density (e.g., high ligand densities on a lipid entity of the invention may be advantageous for increased binding to target cells). Preventing early by macrophages can be addressed with a sterically stabilized lipid entity of the invention and linking ligands to the terminus of molecules such as PEG, which is anchored in the lipid entity of the invention (e.g., lipid particle or nanoparticle or liposome or lipid bylayer). The microenvironment of a cell mass such as a tumor microenvironment can be targeted; for instance, it may be advantageous to target cell mass vasculature, such as the the tumor vasculature microenvironment. Thus, the invention comprehends targeting VEGF. VEGF and its receptors are well-known proangiogenic molecules and are well-characterized targets for antiangiogenic therapy. Many small-molecule inhibitors of receptor tyrosine kinases, such as VEGFRs or basic FGFRs, have been developed as anticancer agents and the invention comprehends coupling any one or more of these peptides to a lipid entity of the invention, e.g., phage IVO peptide(s) (e.g., via or with a PEG terminus), tumor-homing peptide APRPG such as APRPG-PEG-modified. VCAM, the vascular endothelium plays a key role in the pathogenesis of inflammation, thrombosis and atherosclerosis. CAMs are involved in inflammatory disorders, including cancer, and are a logical target, E- and P-selectins, VCAM-1 and ICAMs. Can be used to target a lipid entity of the invention., e.g., with PEGylation. Matrix metalloproteases (MMPs) belong to the family of zinc-dependent endopeptidases. They are involved in tissue remodeling, tumor invasiveness, resistance to apoptosis and metastasis. There are four MMP inhibitors called TIMP1-4, which determine the balance between tumor growth inhibition and metastasis; a protein involved in the angiogenesis of tumor vessels is MT1-MMP, expressed on newly formed vessels and tumor tissues. The proteolytic activity of MT1-MMP cleaves proteins, such as fibronectin, elastin, collagen and laminin, at the plasma membrane and activates soluble MMPs, such as MMP-2, which degrades the matrix. An antibody or fragment thereof such as a Fab′ fragment can be used in the practice of the invention such as for an antihuman MT1-MMP monoclonal antibody linked to a lipid entity of the invention, e.g., via a spacer such as a PEG spacer. α β-integrins or integrins are a group of transmembrane glycoprotein receptors that mediate attachment between a cell and its surrounding tissues or extracellular matrix. Integrins contain two distinct chains (heterodimers) called α- and β-subunits. The tumor tissue-specific expression of integrin receptors can be been utilized for targeted delivery in the invention, e.g., whereby the targeting moiety can be an RGD peptide such as a cyclic RGD. Aptamers are ssDNA or RNA oligonucleotides that impart high affinity and specific recognition of the target molecules by electrostatic interactions, hydrogen bonding and hydro phobic interactions as opposed to the Watson-Crick base pairing, which is typical for the bonding interactions of oligonucleotides. Aptamers as a targeting moiety can have advantages over antibodies: aptamers can demonstrate higher target antigen recognition as compared with antibodies; aptamers can be more stable and smaller in size as compared with antibodies; aptamers can be easily synthesized and chemically modified for molecular conjugation; and aptamers can be changed in sequence for improved selectivity and can be developed to recognize poorly immunogenic targets. Such moieties as a sgc8 aptamer can be used as a targeting moiety (e.g., via covalent linking to the lipid entity of the invention, e.g., via a spacer, such as a PEG spacer). The targeting moiety can be stimuli-sensitive, e.g., sensitive to an externally applied stimuli, such as magnetic fields, ultrasound or light; and pH-triggering can also be used, e.g., a labile linkage can be used between a hydrophilic moiety such as PEG and a hydrophobic moiety such as a lipid entity of the invention, which is cleaved only upon exposure to the relatively acidic conditions characteristic of the a particular environment or microenvironment such as an endocytic vacuole or the acidotic tumor mass. pH-sensitive copolymers can also be incorporated in embodiments of the invention can provide shielding; diortho esters, vinyl esters, cysteine-cleavable lipopolymers, double esters and hydrazones are a few examples of pH-sensitive bonds that are quite stable at pH 7.5, but are hydrolyzed relatively rapidly at pH 6 and below, e.g., a terminally alkylated copolymer of N-isopropylacrylamide and methacrylic acid that copolymer facilitates destabilization of a lipid entity of the invention and release in compartments with decreased pH value; or, the invention comprehends ionic polymers for generation of a pH-responsive lipid entity of the invention (e.g., poly(methacrylic acid), poly(diethylaminoethyl methacrylate), poly(acrylamide) and poly(acrylic acid)). Temperature-triggered delivery is also within the ambit of the invention. Many pathological areas, such as inflamed tissues and tumors, show a distinctive hyperthermia compared with normal tissues. Utilizing this hyperthermia is an attractive strategy in cancer therapy since hyperthermia is associated with increased tumor permeability and enhanced uptake. This technique involves local heating of the site to increase microvascular pore size and blood flow, which, in turn, can result in an increased extravasation of embodiments of the invention. Temperature-sensitive lipid entity of the invention can be prepared from thermosensitive lipids or polymers with a low critical solution temperature. Above the low critical solution temperature (e.g., at site such as tumor site or inflamed tissue site), the polymer precipitates, disrupting the liposomes to release. Lipids with a specific gel-to-liquid phase transition temperature are used to prepare these lipid entities of the invention; and a lipid for a thermosensitive embodiment can be dipalmitoylphosphatidylcholine. Thermosensitive polymers can also facilitate destabilization followed by release, and a useful thermosensitive polymer is poly (N-isopropylacrylamide). Another temperature triggered system can employ lysolipid temperature-sensitive liposomes. The invention also comprehends redox-triggered delivery: The difference in redox potential between normal and inflamed or tumor tissues, and between the intra- and extra-cellular environments has been exploited for delivery; e.g., GSH is a reducing agent abundant in cells, especially in the cytosol, mitochondria and nucleus. The GSH concentrations in blood and extracellular matrix are just one out of 100 to one out of 1000 of the intracellular concentration, respectively. This high redox potential difference caused by GSH, cysteine and other reducing agents can break the reducible bonds, destabilize a lipid entity of the invention and result in release of payload. The disulfide bond can be used as the cleavable/reversible linker in a lipid entity of the invention, because it causes sensitivity to redox owing to the disulfideto-thiol reduction reaction; a lipid entity of the invention can be made reduction sensitive by using two (e.g., two forms of a disulfide-conjugated multifunctional lipid as cleavage of the disulfide bond (e.g., via tris(2-carboxyethyl)phosphine, dithiothreitol, L-cysteine or GSH), can cause removal of the hydrophilic head group of the conjugate and alter the membrane organization leading to release of payload. Calcein release from reduction-sensitive lipid entity of the invention containing a disulfide conjugate can be more useful than a reduction-insensitive embodiment. Enzymes can also be used as a trigger to release payload. Enzymes, including MMPs (e.g. MMP2), phospholipase A2, alkaline phosphatase, transglutaminase or phosphatidylinositol-specific phospholipase C, have been found to be overexpressed in certain tissues, e.g., tumor tissues. In the presence of these enzymes, specially engineered enzyme-sensitive lipid entity of the invention can be disrupted and release the payload. an MMP2-cleavable octapeptide (Gly-Pro-Leu-Gly-Ile-Ala-Gly-Gln) can be incorporated into a linker, and can have antibody targeting, e.g., antibody 2C5. The invention also comprehends light- or energy-triggered delivery, e.g., the lipid entity of the invention can be light-sensitive, such that light or energy can facilitate structural and conformational changes, which lead to direct interaction of the lipid entity of the invention with the target cells via membrane fusion, photo-isomerism, photofragmentation or photopolymerization; such a moiety therefor can be benzoporphyrin photosensitizer. Ultrasound can be a form of energy to trigger delivery; a lipid entity of the invention with a small quantity of particular gas, including air or perfluorated hydrocarbon can be triggered to release with ultrasound, e.g., low-frequency ultrasound (LFUS). Magnetic delivery: A lipid entity of the invention can be magnetized by incorporation of magnetites, such as Fe₃O₄ or γ-Fe₂O₃, e.g., those that are less than 10 nm in size. Targeted delivery can be then by exposure to a magnetic field.

[1207] Also as to active targeting, the invention also comprehends intracellular delivery. Since liposomes follow the endocytic pathway, they are entrapped in the endosomes (pH 6.5-6) and subsequently fuse with lysosomes (pH<5), where they undergo degradation that results in a lower therapeutic potential. The low endosomal pH can be taken advantage of to escape degradation. Fusogenic lipids or peptides, which destabilize the endosomal membrane after the conformational transition/activation at a lowered pH. Amines are protonated at an acidic pH and cause endosomal swelling and rupture by a buffer effect Unsaturated dioleoylphosphatidylethanolamine (DOPE) readily adopts an inverted hexagonal shape at a low pH, which causes fusion of liposomes to the endosomal membrane. This process destabilizes a lipid entity containing DOPE and releases the cargo into the cytoplasm; fusogenic lipid GALA, cholesteryl-GALA and PEG-GALA may show a highly efficient endosomal release; a pore-forming protein listeriolysin O may provide an endosomal escape mechanism; and, histidine-rich peptides have the ability to fuse with the endosomal membrane, resulting in pore formation, and can buffer the proton pump causing membrane lysis.

[1208] Also as to active targeting, cell-penetrating peptides (CPPs) facilitate uptake of macromolecules through cellular membranes and, thus, enhance the delivery of CPP-modified molecules inside the cell. CPPs can be split into two classes: amphipathic helical peptides, such as transportan and MAP, where lysine residues are major contributors to the positive charge; and Arg-rich peptides, such as TATp, Antennapedia or penetratin. TATp is a transcription-activating factor with 86 amino acids that contains a highly basic (two Lys and six Arg among nine residues) protein transduction domain, which brings about nuclear localization and RNA binding. Other CPPs that have been used for the modification of liposomes include the following: the minimal protein transduction domain of Antennapedia, a Drosophilia homeoprotein, called penetratin, which is a 16-mer peptide (residues 43-58) present in the third helix of the homeodomain; a 27-amino acid-long chimeric CPP, containing the peptide sequence from the amino terminus of the neuropeptide galanin bound via the Lys residue, mastoparan, a wasp venom peptide; VP22, a major structural component of HSV-1 facilitating intracellular transport and transportan (18-mer) amphipathic model peptide that translocates plasma membranes of mast cells and endothelial cells by both energy-dependent and -independent mechanisms. The invention comprehends a lipid entity of the invention modified with CPP(s), for intracellular delivery that may proceed via energy dependent macropinocytosis followed by endosomal escape. The invention further comprehends organelle-specific targeting. A lipid entity of the invention surface-functionalized with the triphenylphosphonium (TPP) moiety or a lipid entity of the invention with a lipophilic cation, rhodamine 123 can be effective in delivery of cargo to mitochondria. DOPE/sphingomyelin/stearyl-octa-arginine can delivers cargos to the mitochondrial interior via membrane fusion. A lipid entity of the invention surface modified with a lysosomotropic ligand, octadecyl rhodamine B can deliver cargo to lysosomes. Ceramides are useful in inducing lysosomal membrane permeabilization; the invention comprehends intracellular delivery of a lipid entity of the invention having a ceramide. The invention further comprehends a lipid entity of the invention targeting the nucleus, e.g., via a DNA-intercalating moiety. The invention also comprehends multifunctional liposomes for targeting, i.e., attaching more than one functional group to the surface of the lipid entity of the invention, for instance to enhances accumulation in a desired site and/or promotes organelle-specific delivery and/or target a particular type of cell and/or respond to the local stimuli such as temperature (e.g., elevated), pH (e.g., decreased), respond to externally applied stimuli such as a magnetic field, light, energy, heat or ultrasound and/or promote intracellular delivery of the cargo. All of these are considered actively targeting moieties.

[1209] An embodiment of the invention includes the delivery system comprising an actively targeting lipid particle or nanoparticle or liposome or lipid bylayer delivery system; or comprising a lipid particle or nanoparticle or liposome or lipid bylayer comprising a targeting moiety whereby there is active targeting or wherein the targeting moiety is an actively targeting moiety. A targeting moiety can be one or more targeting moieties, and a targeting moiety can be for any desired type of targeting such as, e.g., to target a cell such as any herein-mentioned; or to target an organelle such as any herein-mentioned; or for targeting a response such as to a physical condition such as heat, energy, ultrasound, light, pH, chemical such as enzymatic, or magnetic stimuli; or to target to achieve a particular outcome such as delivery of payload to a particular location, such as by cell penetration.

### Targeting Moiety

[1210] It should be understood that as to each possible targeting or active targeting moiety herein-discussed, there is an aspect of the invention wherein the delivery system comprises such a targeting or active targeting moiety. Likewise, the following table provides exemplary targeting moieties that can be used in the practice of the invention an as to each an aspect of the invention provides a delivery system that comprises such a targeting moiety.

TABLE 17

| Targeting Moiety | Target Molecule | Target Cell or Tissue |
|---|---|---|
| folate | folate receptor | cancer cells |
| transferrin | transferrin receptor | cancer cells |
| Antibody CC52 | rat CC531 | rat colon |
| | | adenocarcinoma |
| | | CC531 |
| anti- HER2 antibody | HER2 | HER2-overexpressing |
| | | tumors |
| anti-GD2 | GD2 | neuroblastoma, |
| | | melanoma |
| anti-EGFR | EGFR | tumor cells |
| | | overexpressingEGFR |
| pH-dependent | | ovarian carcinoma |
| fusogenic | | |
| peptide diINF-7 | | |
| anti-VEGFR | VEGF Receptor | tumor vasculature |
| anti-CD19 | CD19 | leukemia, lymphoma |
| | (B cell marker) | |
| cell-penetrating peptide | | blood-brain barrier |
| cyclic arginine-glycine- | avβ3 | glioblastoma cells, |
| aspartic acid-tyrosine- | | human umbilical |
| cysteine peptide | | vein endothelial cells, |
| (c(RGDyC)-LP) | | tumor angiogenesis |
| ASSHN peptide | | endothelial progenitor |
| | | cells; anti- cancer |
| PR_b peptide | α₅β₁ integrin | cancer cells |
| AG86 peptide | α₆β₄ integrin | cancer cells |
| KCCYSL | HER-2 receptor | cancer cells |
| (P6.1 peptide) | | |
| affinity peptide LN | Aminopeptidase N | APN-positive tumor |
| (YEVGHRC) | (APN/CD13) | |
| synthetic somatostatin | Somatostatin | breast cancer |
| analogue | receptor 2 (SSTR2) | |
| anti-CD20 | B-lymphocytes | B cell lymphoma |
| monoclonal antibody | | |

[1211] Thus, in an embodiment of the delivery system, the targeting moiety comprises a receptor ligand, such as, for example, hyaluronic acid for CD44 receptor, galactose for hepatocytes, or antibody or fragment thereof such as a binding antibody fragment against a desired surface receptor, and as to each of a targeting moiety comprising a receptor ligand, or an antibody or fragment thereof such as a binding fragment thereof, such as against a desired surface receptor, there is an aspect of the invention wherein the delivery system comprises a targeting moiety comprising a receptor ligand, or an antibody or fragment thereof such as a binding fragment thereof, such as against a desired surface receptor, or hyaluronic acid for CD44 receptor, galactose for hepatocytes (see, e.g., Surace et al, “Lipoplexes targeting the CD44 hyaluronic acid receptor for efficient transfection of breast cancer cells,” J. Mol Pharm 6(4):1062-73; doi: 10.1021/mp800215d (2009); Sonoke et al, “Galactose-modified cationic liposomes as a liver-targeting delivery system for small interfering RNA,” Biol Pharm Bull. 34(8):1338-42 (2011); Torchilin, “Antibody-modified liposomes for cancer chemotherapy,” Expert Opin. Drug Deliv. 5 (9), 1003-1025 (2008); Manjappa et al, “Antibody derivatization and conjugation strategies: application in preparation of stealth immunoliposome to target chemotherapeutics to tumor,” J. Control. Release 150 (1), 2-22 (2011); Sofou S “Antibody-targeted liposomes in cancer therapy and imaging,” Expert Opin. Drug Deliv. 5 (2): 189-204 (2008); Gao J et al, “Antibody-targeted immunoliposomes for cancer treatment,” Mini. Rev. Med. Chem. 13(14): 2026-2035 (2013); Molavi et al, “Anti-CD30 antibody conjugated liposomal doxorubicin with significantly improved therapeutic efficacy against anaplastic large cell lymphoma,” Biomaterials 34(34):8718-25 (2013), each of which and the documents cited therein are hereby incorporated herein by reference).

[1212] Moreover, in view of the teachings herein the skilled artisan can readily select and apply a desired targeting moiety in the practice of the invention as to a lipid entity of the invention. The invention comprehends an embodiment wherein the delivery system comprises a lipid entity having a targeting moiety.

### Additional Delivery Approaches

[1213] In an embodiment of the delivery system, the protein comprises a CRISPR protein, or portion thereof.

[1214] In some embodiments a non-capsid protein or protein that is not a virus outer protein or a virus envelope (sometimes herein shorthanded as “non-capsid protein”), such as a CRISPR protein or portion thereof, can have one or more functional moiety(ies) thereon, such as a moiety for targeting or locating, such as an NLS or NES, or an activator or repressor.

[1215] In an embodiment of the delivery system, a protein or portion thereof can comprise a tag.

[1216] In an aspect, the invention provides a virus particle comprising a capsid or outer protein having one or more hybrid virus capsid or outer proteins comprising the virus capsid or outer protein attached to at least a portion of a non-capsid protein or a CRISPR protein.

[1217] In an aspect, the invention provides an in vitro method of delivery comprising contacting the delivery system with a cell, optionally a eukaryotic cell, whereby there is delivery into the cell of constituents of the delivery system.

[1218] In an aspect, the invention provides an in vitro, a research or study method of delivery comprising contacting the delivery system with a cell, optionally a eukaryotic cell, whereby there is delivery into the cell of constituents of the delivery system, obtaining data or results from the contacting, and transmitting the data or results.

[1219] In an aspect, the invention provides a cell from or of an in vitro method of delivery, wherein the method comprises contacting the delivery system with a cell, optionally a eukaryotic cell, whereby there is delivery into the cell of constituents of the delivery system, and optionally obtaining data or results from the contacting, and transmitting the data or results.

[1220] In an aspect, the invention provides a cell from or of an in vitro method of delivery, wherein the method comprises contacting the delivery system with a cell, optionally a eukaryotic cell, whereby there is delivery into the cell of constituents of the delivery system, and optionally obtaining data or results from the contacting, and transmitting the data or results; and wherein the cell product is altered compared to the cell not contacted with the delivery system, for example altered from that which would have been wild type of the cell but for the contacting.

[1221] In an embodiment, the cell product is non-human or animal.

[1222] In one aspect, the invention provides a particle delivery system comprising a composite virus particle, wherein the composite virus particle comprises a lipid, a virus capsid protein, and at least a portion of a non-capsid protein or peptide. The non-capsid peptide or protein can have a molecular weight of up to one megadalton.

[1223] In one embodiment, the particle delivery system comprises a virus particle adsorbed to a liposome or lipid particle or nanoparticle. In one embodiment, a virus is adsorbed to a liposome or lipid particle or nanoparticle either through electrostatic interactions, or is covalently linked through a linker. The lipid particle or nanoparticles (1 mg/ml) dissolved in either sodium acetate buffer (pH 5.2) or pure H2O (pH 7) are positively charged. The isoelectropoint of most viruses is in the range of 3.5-7. They have a negatively charged surface in either sodium acetate buffer (pH 5.2) or pure H2O. The electrostatic interaction between the virus and the liposome or synthetic lipid nanoparticle is the most significant factor driving adsorption. By modifying the charge density of the lipid nanoparticle, e.g. inclusion of neutral lipids into the lipid nanoparticle, it is possible to modulate the interaction between the lipid nanoparticle and the virus, hence modulating the assembly. In one embodiment, the liposome comprises a cationic lipid.

[1224] In one embodiment, the liposome of the particle delivery system comprises a CRISPR system component.

[1225] In one aspect, the invention provides a delivery system comprising one or more hybrid virus capsid proteins in combination with a lipid particle, wherein the hybrid virus capsid protein comprises at least a portion of a virus capsid protein attached to at least a portion of a non-capsid protein.

[1226] In one embodiment, the virus capsid protein of the delivery system is attached to a surface of the lipid particle. When the lipid particle is a bilayer, e.g., a liposome, the lipid particle comprises an exterior hydrophilic surface and an interior hydrophilic surface. In one embodiment, the virus capsid protein is attached to a surface of the lipid particle by an electrostatic interaction or by hydrophobic interaction.

[1227] In one embodiment, the particle delivery system has a diameter of 50-1000 nm, preferably 100-1000 nm.

[1228] In one embodiment, the delivery system comprises a non-capsid protein or peptide, wherein the non-capsid protein or peptide has a molecular weight of up to a megadalton. In one embodiment, the non-capsid protein or peptide has a molecular weight in the range of 110 to 160 kDa, 160 to 200 kDa, 200 to 250 kDa, 250 to 300 kDa, 300 to 400 kDa, or 400 to 500 kDa.

[1229] In one embodiment, the delivery system comprises a non-capsid protein or peptide, wherein the protein or peptide comprises a CRISPR protein or peptide. In one embodiment, the protein or peptide comprises a Cas9, a Cpf1 or a C2c2/Cas13a.

[1230] In one embodiment, a weight ratio of hybrid capsid protein to wild-type capsid protein is from 1:10 to 1:1, for example, 1:1, 1:2, 1:3, 1:4, 1:5, 1:6, 1:7, 1:8, 1:9 and 1:10.

[1231] In one embodiment, the virus of the delivery system is an Adenoviridae or a Parvoviridae or a Rhabdoviridae or an enveloped virus having a glycoprotein protein. In one embodiment, the virus is an adeno-associated virus (AAV) or an adenovirus or a VSV or a rabies virus. In one embodiment, the virus is a retrovirus or a lentivirus. In one embodiment, the virus is murine leukemia virus (MuMLV).

[1232] In one embodiment, the virus capsid protein of the delivery system comprises VP1, VP2 or VP3.

[1233] In one embodiment, the virus capsid protein of the delivery system is VP3, and the non-capsid protein is inserted into or tethered or connected to VP3 loop 3 or loop 6.

[1234] In one embodiment, the virus of the delivery system is delivered to the interior of a cell.

[1235] In one embodiment, the virus capsid protein and the non-capsid protein are capable of dissociating after delivery into a cell.

[1236] In one aspect of the delivery system, the virus capsid protein is attached to the non-capsid protein by a linker. In one embodiment, the linker comprises amino acids. In one embodiment, the linker is a chemical linker. In another embodiment, the linker is cleavable or biodegradable. In one embodiment, the linker comprises (GGGGS)1-3, ENLYFQG, or a disulfide.

[1237] In one embodiment of the delivery system, each terminus of the non-capsid protein is attached to the capsid protein by a linker moiety.

[1238] In one embodiment, the non-capsid protein is attached to the exterior portion of the virus capsid protein. As used herein, “exterior portion” as it refers to a virus capsid protein means the outer surface of the virus capsid protein when it is in a formed virus capsid.

[1239] In one embodiment, the non-capsid protein is attached to the interior portion of the capsid protein or is encapsulated within the lipid particle. As used herein, “interior portion” as it refers to a virus capsid protein means the inner surface of the virus capsid protein when it is in a formed virus capsid. In one embodiment, the virus capsid protein and the non-capsid protein are a fusion protein.

[1240] In one embodiment, the fusion protein is attached to the surface of the lipid particle.

[1241] In one embodiment, the non-capsid protein is attached to the virus capsid protein prior to formation of the capsid.

[1242] In one embodiment, the non-capsid protein is attached to the virus capsid protein after formation of the capsid.

[1243] In one embodiment, the non-capsid protein comprises a targeting moiety.

[1244] In one embodiment, the targeting moiety comprises a receptor ligand.

[1245] In an embodiment, the non-capsid protein comprises a tag.

[1246] In an embodiment, the non-capsid protein comprises one or more heterologous nuclear localization signals(s) (NLSs).

[1247] In an embodiment, the protein or peptide comprises a Type II CRISPR protein or a Type V CRISPR protein.

[1248] In an embodiment, the delivery system further comprises guide RNS, optionally complexed with the CRISPR protein.

[1249] In an embodiment, the delivery system comprises a protease or nucleic acid molecule(s) encoding a protease that is expressed, whereby the protease cleaves the linker. In certain embodiments, there is protease expression, linker cleavage, and dissociation of payload from capsid in the absence of productive virus replication.

[1250] In an aspect, the invention provides a delivery system comprising a first hybrid virus capsid protein and a second hybrid virus capsid protein, wherein the first hybrid virus capsid protein comprises a virus capsid protein attached to a first part of a protein, and wherein the second hybrid virus capsid protein comprises a second virus capsid protein attached to a second part of the protein, wherein the first part of the protein and the second part of the protein are capable of associating to form a functional protein.

[1251] In an aspect, the invention provides a delivery system comprising a first hybrid virus capsid protein and a second hybrid virus capsid protein, wherein the first hybrid virus capsid protein comprises a virus capsid protein attached to a first part of a CRISPR protein, and wherein the second hybrid virus capsid protein comprises a second virus capsid protein attached to a second part of a CRISPR protein, wherein the first part of the CRISPR protein and the second part of the CRISPR protein are capable of associating to form a functional CRISPR protein.

[1252] In an embodiment of the delivery system, the first hybrid virus capsid protein and the second virus capsid protein are on the surface of the same virus particle.

[1253] In an embodiment of the delivery system, the first hybrid virus capsule protein is located at the interior of a first virus particle and the second hybrid virus capsid protein is located at the interior of a second virus particle.

[1254] In an embodiment of the delivery system, the first part of the protein or CRISPR protein is linked to a first member of a ligand pair, and the second part of the protein or CRISPR protein is linked to a second member of a ligand pair, wherein the first part of the ligand pair binds to the second part of the ligand pair in a cell. In an embodiment, the binding of the first part of the ligand pair to the second part of the ligand pair is inducible.

[1255] In an embodiment of the delivery system, either or both of the first part of the protein or CRISPR protein and the second part of the protein or CRISPR protein comprise one or more NLSs.

[1256] In an embodiment of the delivery system, either or both of the first part of the protein or CRISPR protein and the second part of the protein or CRISPR protein comprise one or more nuclear export signals (NESs).

[1257] In certain embodiments, the virus structural component comprises one or more capsid proteins including an entire capsid. In certain embodiments, such as wherein a viral capsid comprises multiple copies of different proteins, the delivery system can provide one or more of the same protein or a mixture of such proteins. For example, AAV comprises 3 capsid proteins, VP1, VP2, and VP3, thus delivery systems of the invention can comprise one or more of VP1, and/or one or more of VP2, and/or one or more of VP3. Accordingly, the present invention is applicable to a virus within the family Adenoviridae, such as Atadenovirus, e.g., Ovine atadenovirus D, Aviadenovirus, e.g., Fowl aviadenovirus A, Ichtadenovirus, e.g., Sturgeon ichtadenovirus A, Mastadenovirus (which includes adenoviruses such as all human adenoviruses), e.g., Human mastadenovirus C, and Siadenovirus, e.g., Frog siadenovirus A. Thus, a virus of within the family Adenoviridae is contemplated as within the invention with discussion herein as to adenovirus applicable to other family members. Target-specific AAV capsid variants can be used or selected. Non-limiting examples include capsid variants selected to bind to chronic myelogenous leukemia cells, human CD34 PBPC cells, breast cancer cells, cells of lung, heart, dermal fibroblasts, melanoma cells, stem cell, glioblastoma cells, coronary artery endothelial cells and keratinocytes. See, e.g., Buning et al, 2015, Current Opinion in Pharmacology 24, 94-104. From teachings herein and knowledge in the art as to modifications of adenovirus (see, e.g., U.S. Pat. Nos. 9,410,129, 7,344,872, 7,256,036, 6,911,199, 6,740,525; Matthews, “Capsid-Incorporation of Antigens into Adenovirus Capsid Proteins for a Vaccine Approach,” Mol Pharm, 8(1): 3-11 (2011)), as well as regarding modifications of AAV, the skilled person can readily obtain a modified adenovirus that has a large payload protein or a CRISPR-protein, despite that heretofore it was not expected that such a large protein could be provided on an adenovirus. And as to the viruses related to adenovirus mentioned herein, as well as to the viruses related to AAV mentioned herein, the teachings herein as to modifying adenovirus and AAV, respectively, can be applied to those viruses without undue experimentation from this disclosure and the knowledge in the art.

[1258] In another aspect, the invention provides a non-naturally occurring or engineered CRISPR protein associated with Adeno Associated Virus (AAV), e.g., an AAV comprising a CRISPR protein as a fusion, with or without a linker, to or with an AAV capsid protein such as VP1, VP2, and/or VP3; and, for shorthand purposes, such a non-naturally occurring or engineered CRISPR protein is herein termed a “AAV-CRISPR protein” More in particular, modifying the knowledge in the art, e.g., Rybniker et al., “Incorporation of Antigens into Viral Capsids Augments Immunogenicity of Adeno-Associated Virus Vector-Based Vaccines,” J Virol. December 2012; 86(24): 13800-13804, Lux K, et al. 2005. Green fluorescent protein-tagged adeno-associated virus particles allow the study of cytosolic and nuclear trafficking. J. Virol. 79:11776-11787, Munch R C, et al. 2012. “Displaying high-affinity ligands on adeno-associated viral vectors enables tumor cell-specific and safe gene transfer.” Mol. Ther. [Epub ahead of print.] doi:10.1038/mt.2012.186 and Warrington K H, Jr, et al. 2004. Adeno-associated virus type 2 VP2 capsid protein is nonessential and can tolerate large peptide insertions at its N terminus. J. Virol. 78:6595-6609, each incorporated herein by reference, one can obtain a modified AAV capsid of the invention. It will be understood by those skilled in the art that the modifications described herein if inserted into the AAV cap gene may result in modifications in the VP1, VP2 and/or VP3 capsid subunits. Alternatively, the capsid subunits can be expressed independently to achieve modification in only one or two of the capsid subunits (VP1, VP2, VP3, VP1+VP2, VP1+VP3, or VP2+VP3). One can modify the cap gene to have expressed at a desired location a non-capsid protein advantageously a large payload protein, such as a CRISPR-protein. Likewise, these can be fusions, with the protein, e.g., large payload protein such as a CRISPR-protein fused in a manner analogous to prior art fusions. See, e.g., US Patent Publication 20090215879; Nance et al., “Perspective on Adeno-Associated Virus Capsid Modification for Duchenne Muscular Dystrophy Gene Therapy,” Hum Gene Ther. 26(12):786-800 (2015) and documents cited therein, incorporated herein by reference. The skilled person, from this disclosure and the knowledge in the art can make and use modified AAV or AAV capsid as in the herein invention, and through this disclosure one knows now that large payload proteins can be fused to the AAV capsid. Applicants provide AAV capsid-CRISPR protein (e.g., Cas, Cas9, dCas9, Cpf1, Cas13a, Cas13b) fusions and those AAV-capsid CRISPR protein (e.g., Cas, Cas9) fusions can be a recombinant AAV that contains nucleic acid molecule(s) encoding or providing CRISPR-Cas or CRISPR system or complex RNA guide(s), whereby the CRISPR protein (e.g., Cas, Cas9) fusion delivers a CRISPR-Cas or CRISPR system complex (e.g., the CRISPR protein or Cas or Cas9 or Cpf1 is provided by the fusion, e.g., VP1, VP2, pr VP3 fusion, and the guide RNA is provided by the coding of the recombinant virus, whereby in vivo, in a cell, the CRISPR-Cas or CRISPR system is assembled from the nucleic acid molecule(s) of the recombinant providing the guide RNA and the outer surface of the virus providing the CRISPR-Enzyme or Cas or Cas9. Such as complex may herein be termed an “AAV-CRISPR system” or an “AAV-CRISPR-Cas” or “AAV-CRISPR complex” or AAV-CRISPR-Cas complex.” Accordingly, the instant invention is also applicable to a virus in the genus Dependoparvovirus or in the family Parvoviridae, for instance, AAV, or a virus of Amdoparvovirus, e.g., Carnivore amdoparvovirus 1, a virus of Aveparvovirus, e.g., Galliform aveparvovirus 1, a virus of Bocaparvovirus, e.g., Ungulate bocaparvovirus 1, a virus of Copiparvovirus, e.g., Ungulate copiparvovirus 1, a virus of Dependoparvovirus, e.g., Adeno-associated dependoparvovirus A, a virus of Erythroparvovirus, e.g., Primate erythroparvovirus 1, a virus of Protoparvovirus, e.g., Rodent protoparvovirus 1, a virus of Tetraparvovirus, e.g., Primate tetraparvovirus 1. Thus, a virus of within the family Parvoviridae or the genus Dependoparvovirus or any of the other foregoing genera within Parvoviridae is contemplated as within the invention with discussion herein as to AAV applicable to such other viruses.

[1259] In one aspect, the invention provides a non-naturally occurring or engineered composition comprising a CRISPR enzyme which is part of or tethered to a AAV capsid domain, i.e., VP1, VP2, or VP3 domain of Adeno-Associated Virus (AAV) capsid. In some embodiments, part of or tethered to a AAV capsid domain includes associated with associated with a AAV capsid domain. In some embodiments, the CRISPR enzyme may be fused to the AAV capsid domain. In some embodiments, the fusion may be to the N-terminal end of the AAV capsid domain. As such, in some embodiments, the C-terminal end of the CRISPR enzyme is fused to the N-terminal end of the AAV capsid domain. In some embodiments, an NLS and/or a linker (such as a GlySer linker) may be positioned between the C-terminal end of the CRISPR enzyme and the N-terminal end of the AAV capsid domain. In some embodiments, the fusion may be to the C-terminal end of the AAV capsid domain. In some embodiments, this is not preferred due to the fact that the VP1, VP2 and VP3 domains of AAV are alternative splices of the same RNA and so a C-terminal fusion may affect all three domains. In some embodiments, the AAV capsid domain is truncated. In some embodiments, some or all of the AAV capsid domain is removed. In some embodiments, some of the AAV capsid domain is removed and replaced with a linker (such as a GlySer linker), typically leaving the N-terminal and C-terminal ends of the AAV capsid domain intact, such as the first 2, 5 or 10 amino acids. In this way, the internal (non-terminal) portion of the VP3 domain may be replaced with a linker. It is particularly preferred that the linker is fused to the CRISPR protein. A branched linker may be used, with the CRISPR protein fused to the end of one of the branches. This allows for some degree of spatial separation between the capsid and the CRISPR protein. In this way, the CRISPR protein is part of (or fused to) the AAV capsid domain.

[1260] Alternatively, the CRISPR enzyme may be fused in frame within, i.e. internal to, the AAV capsid domain. Thus in some embodiments, the AAV capsid domain again preferably retains its N-terminal and C-terminal ends. In this case, a linker is preferred, in some embodiments, either at one or both ends of the CRISPR enzyme. In this way, the CRISPR enzyme is again part of (or fused to) the AAV capsid domain. In certain embodiments, the positioning of the CRISPR enzyme is such that the CRISPR enzyme is at the external surface of the viral capsid once formed. In one aspect, the invention provides a non-naturally occurring or engineered composition comprising a CRISPR enzyme associated with a AAV capsid domain of Adeno-Associated Virus (AAV) capsid. Here, associated may mean in some embodiments fused, or in some embodiments bound to, or in some embodiments tethered to. The CRISPR protein may, in some embodiments, be tethered to the VP1, VP2, or VP3 domain. This may be via a connector protein or tethering system such as the biotin-streptavidin system. In one example, a biotinylation sequence (15 amino acids) could therefore be fused to the CRISPR protein. When a fusion of the AAV capsid domain, especially the N-terminus of the AAV AAV capsid domain, with streptavidin is also provided, the two will therefore associate with very high affinity. Thus, in some embodiments, provided is a composition or system comprising a CRISPR protein-biotin fusion and a streptavidin-AAV capsid domain arrangement, such as a fusion. The CRISPR protein-biotin and streptavidin-AAV capsid domain forms a single complex when the two parts are brought together. NLSs may also be incorporated between the CRISPR protein and the biotin; and/or between the streptavidin and the AAV capsid domain.

[1261] An alternative tether may be to fuse or otherwise associate the AAV capsid domain to an adaptor protein which binds to or recognizes to a corresponding RNA sequence or motif. In some embodiments, the adaptor is or comprises a binding protein which recognizes and binds (or is bound by) an RNA sequence specific for said binding protein. In some embodiments, a preferred example is the MS2 (see Konermann et al. December 2014, cited infra, incorporated herein by reference) binding protein which recognizes and binds (or is bound by) an RNA sequence specific for the MS2 protein.

[1262] With the AAV capsid domain associated with the adaptor protein, the CRISPR protein may, in some embodiments, be tethered to the adaptor protein of the AAV capsid domain. The CRISPR protein may, in some embodiments, be tethered to the adaptor protein of the AAV capsid domain via the CRISPR enzyme being in a complex with a modified guide, see Konermann et al. The modified guide is, in some embodiments, a sgRNA. In some embodiments, the modified guide comprises a distinct RNA sequence; see, e.g., PCT/US 14/70175, incorporated herein by reference.

[1263] In some embodiments, distinct RNA sequence is an aptamer. Thus, corresponding aptamer-adaptor protein systems are preferred. One or more functional domains may also be associated with the adaptor protein. An example of a preferred arrangement would be:

[1264] [AAV AAV capsid domain-adaptor protein]-[modified guide-CRISPR protein]

[1265] In certain embodiments, the positioning of the CRISPR protein is such that the CRISPR protein is at the internal surface of the viral capsid once formed. In one aspect, the invention provides a non-naturally occurring or engineered composition comprising a CRISPR protein associated with an internal surface of an AAV capsid domain. Here again, associated may mean in some embodiments fused, or in some embodiments bound to, or in some embodiments tethered to. The CRISPR protein may, in some embodiments, be tethered to the VP1, VP2, or VP3 domain such that it locates to the internal surface of the viral capsid once formed. This may be via a connector protein or tethering system such as the biotin-streptavidin system as described above.

[1266] When the CRISPR protein fusion is designed so as to position the CRISPR protein at the internal surface of the capsid once formed, the CRISPR protein will fill most or all of internal volume of the capsid. Alternatively the CRISPR protein may be modified or divided so as to occupy a less of the capsid internal volume. Accordingly, in certain embodiments, the invention provides a CRISRP protein divided in two portions, one portion comprises in one viral particle or capsid and the second portion comprised in a second viral particle or capsid. In certain embodiments, by splitting the CRISPR protein in two portions, space is made available to link one or more heterologous domains to one or both CRISPR protein portions.

[1267] Split CRISPR proteins are set forth herein and in documents incorporated herein by reference in further detail herein. In certain embodiments, each part of a split CRISRP proteins are attached to a member of a specific binding pair, and when bound with each other, the members of the specific binding pair maintain the parts of the CRISPR protein in proximity. In certain embodiments, each part of a split CRISPR protein is associated with an inducible binding pair. An inducible binding pair is one which is capable of being switched “on” or “off” by a protein or small molecule that binds to both members of the inducible binding pair. In general, according to the invention, CRISPR proteins may preferably split between domains, leaving domains intact. Preferred, non-limiting examples of such CRISPR proteins include, without limitation, Cas9, Cpf1, C2c2, Cas13a, Cas13b, and orthologues. Preferred, non-limiting examples of split points include, with reference to SpCas9: a split position between 202A/203S; a split position between 255F/256D; a split position between 310E/311I; a split position between 534R/535K; a split position between 572E/573C; a split position between 713S/714G; a split position between 1003L/104E; a split position between 1054G/1055E; a split position between 1114N/1115S; a split position between 1152K/1153S; a split position between 1245K/1246G; or a split between 1098 and 1099.

[1268] In some embodiments, any AAV serotype is preferred. In some embodiments, the VP2 domain associated with the CRISPR enzyme is an AAV serotype 2 VP2 domain. In some embodiments, the VP2 domain associated with the CRISPR enzyme is an AAV serotype 8 VP2 domain. The serotype can be a mixed serotype as is known in the art.

[1269] The CRISPR enzyme may form part of a CRISPR-Cas system, which further comprises a guide RNA (sgRNA) comprising a guide sequence capable of hybridizing to a target sequence in a genomic locus of interest in a cell. In some embodiments, the functional CRISPR-Cas system binds to the target sequence. In some embodiments, the functional CRISPR-Cas system may edit the genomic locus to alter gene expression. In some embodiments, the functional CRISPR-Cas system may comprise further functional domains.

[1270] In some embodiments, the CRISPR enzyme is a Cpf1. In some embodiments, the CRISPR enzyme is an FnCpf1. In some embodiments, the CRISPR enzyme is an AsCpf1, although other orthologs are envisaged. FnCpf1 and AsCpf1 are particularly preferred, in some embodiments.

[1271] In some embodiments, the CRISPR enzyme is external to the capsid or virus particle. In the sense that it is not inside the capsid (enveloped or encompassed with the capsid), but is externally exposed so that it can contact the target genomic DNA). In some embodiments, the CRISPR enzyme cleaves both strands of DNA to produce a double strand break (DSB). In some embodiments, the CRISPR enzyme is a nickase. In some embodiments, the CRISPR enzyme is a dual nickase. In some embodiments, the CRISPR enzyme is a dead Cas. In some general embodiments, the CRISPR enzyme is associated with one or more functional domains. In some more specific embodiments, the CRISPR enzyme is a dead Cas and is associated with one or more functional domains. In some embodiments, the CRISPR enzyme comprises a Rec2 or HD2 truncation. In some embodiments, the CRISPR enzyme is associated with the AAV VP2 domain by way of a fusion protein. In some embodiments, the CRISPR enzyme is fused to Destabilization Domain (DD). In other words, the DD may be associated with the CRISPR enzyme by fusion with said CRISPR enzyme. The AAV can then, by way of nucleic acid molecule(s) deliver the stabilizing ligand (or such can be otherwise delivered) In some embodiments, the enzyme may be considered to be a modified CRISPR enzyme, wherein the CRISPR enzyme is fused to at least one destabilization domain (DD) and VP2. In some embodiments, the association may be considered to be a modification of the VP2 domain. Where reference is made herein to a modified VP2 domain, then this will be understood to include any association discussed herein of the VP2 domain and the CRISPR enzyme. In some embodiments, the AAV VP2 domain may be associated (or tethered) to the CRISPR enzyme via a connector protein, for example using a system such as the streptavidin-biotin system. As such, provided is a fusion of a CRISPR enzyme with a connector protein specific for a high affinity ligand for that connector, whereas the AAV VP2 domain is bound to said high affinity ligand. For example, streptavidin may be the connector fused to the CRISPR enzyme, while biotin may be bound to the AAV VP2 domain. Upon co-localization, the streptavidin will bind to the biotin, thus connecting the CRISPR enzyme to the AAV VP2 domain. The reverse arrangement is also possible. In some embodiments, a biotinylation sequence (15 amino acids) could therefore be fused to the AAV VP2 domain, especially the N-terminus of the AAV VP2 domain. A fusion of the CRISPR enzyme with streptavidin is also preferred, in some embodiments. In some embodiments, the biotinylated AAV capsids with streptavidin-CRISPR enzyme are assembled in vitro. This way the AAV capsids should assemble in a straightforward manner and the CRISPR enzyme-streptavidin fusion can be added after assembly of the capsid. In other embodiments a biotinylation sequence (15 amino acids) could therefore be fused to the CRISPR enzyme, together with a fusion of the AAV VP2 domain, especially the N-terminus of the AAV VP2 domain, with streptavidin. For simplicity, a fusion of the CRISPR enzyme and the AAV VP2 domain is preferred in some embodiments. In some embodiments, the fusion may be to the N-terminal end of the CRISPR enzyme. In other words, in some embodiments, the AAV and CRISPR enzyme are associated via fusion. In some embodiments, the AAV and CRISPR enzyme are associated via fusion including a linker. Suitable linkers are discussed herein, but include Gly Ser linkers. Fusion to the N-term of AAV VP2 domain is preferred, in some embodiments. In some embodiments, the CRISPR enzyme comprises at least one Nuclear Localization Signal (NLS). In an aspect, the present invention provides a polynucleotide encoding the present CRISPR enzyme and associated AAV VP2 domain.

[1272] Viral delivery vectors, for example modified viral delivery vectors, are hereby provided. While the AAV may advantageously be a vehicle for providing RNA of the CRISPR-Cas Complex or CRISPR system, another vector may also deliver that RNA, and such other vectors are also herein discussed. In one aspect, the invention provides a non-naturally occurring modified AAV having a VP2-CRISPR enzyme capsid protein, wherein the CRISPR enzyme is part of or tethered to the VP2 domain. In some preferred embodiments, the CRISPR enzyme is fused to the VP2 domain so that, in another aspect, the invention provides a non-naturally occurring modified AAV having a VP2-CRISPR enzyme fusion capsid protein. The following embodiments apply equally to either modified AAV aspect, unless otherwise apparent. Thus, reference herein to a VP2-CRISPR enzyme capsid protein may also include a VP2-CRISPR enzyme fusion capsid protein. In some embodiments, the VP2-CRISPR enzyme capsid protein further comprises a linker. In some embodiments, the VP2-CRISPR enzyme capsid protein further comprises a linker, whereby the VP2-CRISPR enzyme is distanced from the remainder of the AAV. In some embodiments, the VP2-CRISPR enzyme capsid protein further comprises at least one protein complex, e.g., CRISPR complex, such as CRISPR-Cas complex guide RNA that targets a particular DNA, TALE, etc. A CRISPR complex, such as CRISPR-Cas system comprising the VP2-CRISPR enzyme capsid protein and at least one CRISPR complex, such as CRISPR-Cas complex guide RNA that targets a particular DNA, is also provided in one aspect. In general, in some embodiments, the AAV further comprises a repair template. It will be appreciated that comprises here may mean encompassed thin the viral capsid or that the virus encodes the comprised protein. In some embodiments, one or more, preferably two or more guide RNAs, may be comprised/encompassed within the AAV vector. Two may be preferred, in some embodiments, as it allows for multiplexing or dual nickase approaches. Particularly for multiplexing, two or more guides may be used. In fact, in some embodiments, three or more, four or more, five or more, or even six or more guide RNAs may be comprised/encompassed within the AAV. More space has been freed up within the AAV by virtue of the fact that the AAV no longer needs to comprise/encompass the CRISPR enzyme. In each of these instances, a repair template may also be provided comprised/encompassed within the AAV. In some embodiments, the repair template corresponds to or includes the DNA target.

[1273] In a further aspect, the present invention provides compositions comprising the CRISPR enzyme and associated AAV VP2 domain or the polynucleotides or vectors described herein. Also provides are CRISPR-Cas systems comprising guide RNAs.

[1274] Also provided is a method of treating a subject in need thereof, comprising inducing gene editing by transforming the subject with the polynucleotide encoding the system or any of the present vectors. A suitable repair template may also be provided, for example delivered by a vector comprising said repair template. In some embodiments, a single vector provides the CRISPR enzyme through (association with the viral capsid) and at least one of: guide RNA; and/or a repair template. Also provided is a method of treating a subject in need thereof, comprising inducing transcriptional activation or repression by transforming the subject with the polynucleotide encoding the present system or any of the present vectors, wherein said polynucleotide or vector encodes or comprises the catalytically inactive CRISPR enzyme and one or more associated functional domains. Compositions comprising the present system for use in said method of treatment are also provided. A kit of parts may be provided including such compositions. Use of the present system in the manufacture of a medicament for such methods of treatment are also provided.

[1275] Also provided is a pharmaceutical composition comprising the CRISPR enzyme which is part of or tethered to a VP2 domain of Adeno-Associated Virus (AAV) capsid; or the non-naturally occurring modified AAV; or a polynucleotide encoding them.

[1276] Also provided is a complex of the CRISPR enzyme with a guideRNA, such as sgRNA. The complex may further include the target DNA.

[1277] A split CRISPR enzyme, e.g., Cpf1, approach may be used. The so-called ‘split Cas’ approach Split Cas allows for the following. The Cas is split into two pieces and each of these are fused to one half of a dimer. Upon dimerization, the two parts of the Cas are brought together and the reconstituted Cas has been shown to be functional. Thus, one part of the split Cas may be associated with one VP2 domain and second part of the split Cas may be associated with another VP2 domain. The two VP2 domains may be in the same or different capsid. In other words, the split parts of the Cas could be on the same virus particle or on different virus particles.

[1278] In some embodiments, one or more functional domains may be associated with or tethered to CRISPR enzyme and/or may be associated with or tethered to modified guides via adaptor proteins. These can be used irrespective of the fact that the CRISPR enzyme may also be tethered to a virus outer protein or capsid or envelope, such as a VP2 domain or a capsid, via modified guides with aptamer RAN sequences that recognize correspond adaptor proteins.

[1279] In some embodiments, one or more functional domains comprise a transcriptional activator, repressor, a recombinase, a transposase, a histone remodeler, a demethylase, a DNA methyltransferase, a cryptochrome, a light inducible/controllable domain, a chemically inducible/controllable domain, an epigenetic modifying domain, or a combination thereof. Advantageously, the functional domain comprises an activator, repressor or nuclease.

[1280] In some embodiments, a functional domain can have methylase activity, demethylase activity, transcription activation activity, transcription repression activity, transcription release factor activity, histone modification activity, RNA cleavage activity or nucleic acid binding activity, or activity that a domain identified herein has.

[1281] Examples of activators include P65, a tetramer of the herpes simplex activation domain VP16, termed VP64, optimized use of VP64 for activation through modification of both the sgRNA design and addition of additional helper molecules, MS2, P65 and HSF lin the system called the synergistic activation mediator (SAM) (Konermann et al, “Genome-scale transcriptional activation by an engineered CRISPR-Cas9 complex,” Nature 517(7536):583-8 (2015)); and examples of repressors include the KRAB (Kruppel-associated box) domain of Kox1 or SID domain (e.g. SID4X); and an example of a nuclease or nuclease domain suitable for a functional domain comprises Fok1.

[1282] Suitable functional domains for use in practice of the invention, such as activators, repressors or nucleases are also discussed in documents incorporated herein by reference, including the patents and patent publications herein-cited and incorporated herein by reference regarding general information on CRISPR-Cas Systems.

[1283] In some embodiments, the CRISPR enzyme comprises or consists essentially of or consists of a localization signal as, or as part of, the linker between the CRISPR enzyme and the AAV capsid, e.g., VP2. HA or Flag tags are also within the ambit of the invention as linkers as well as Glycine Serine linkers as short as GS up to (GGGGS)3 (SEQ ID NO: 197) In this regard it is mentioned that tags that can be used in embodiments of the invention include affinity tags, such as chitin binding protein (CBP), maltose binding protein (MBP), glutathione-S-transferase (GST), poly(His) tag; solubilization tags such as thioredoxin (TRX) and poly(NANP), MBP, and GST; chromatography tags such as those consisting of polyanionic amino acids, such as FLAG-tag; epitope tags such as V5-tag, Myc-tag, HA-tag and NE-tag; fluorescence tags, such as GFP and mCherry; protein tags that may allow specific enzymatic modification (such as biotinylation by biotin ligase) or chemical modification (such as reaction with F1AsH-EDT2 for fluorescence imaging).

[1284] Also provided is a method of treating a subject, e.g, a subject in need thereof, comprising inducing gene editing by transforming the subject with the AAV-CRISPR enzyme advantageously encoding and expressing in vivo the remaining portions of the CRISPR system (e.g., RNA, guides). A suitable repair template may also be provided, for example delivered by a vector comprising said repair template. Also provided is a method of treating a subject, e.g., a subject in need thereof, comprising inducing transcriptional activation or repression by transforming the subject with the AAV-CRISPR enzyme advantageously encoding and expressing in vivo the remaining portions of the CRISPR system (e.g., RNA, guides); advantageously in some embodiments the CRISPR enzyme is a catalytically inactive CRISPR enzyme and comprises one or more associated functional domains. Where any treatment is occurring ex vivo, for example in a cell culture, then it will be appreciated that the term ‘subject’ may be replaced by the phrase “cell or cell culture.”

[1285] Compositions comprising the present system for use in said method of treatment are also provided. A kit of parts may be provided including such compositions. Use of the present system in the manufacture of a medicament for such methods of treatment are also provided. Use of the present system in screening is also provided by the present invention, e.g., gain of function screens. Cells which are artificially forced to overexpress a gene are be able to down regulate the gene over time (re-establishing equilibrium) e.g. by negative feedback loops. By the time the screen starts the unregulated gene might be reduced again.

[1286] In one aspect, the invention provides an engineered, non-naturally occurring CRISPR-Cas system comprising a AAV-Cas protein and a guide RNA that targets a DNA molecule encoding a gene product in a cell, whereby the guide RNA targets the DNA molecule encoding the gene product and the Cas protein cleaves the DNA molecule encoding the gene product, whereby expression of the gene product is altered; and, wherein the Cas protein and the guide RNA do not naturally occur together. The invention comprehends the guide RNA comprising a guide sequence fused to a tracr sequence. In an embodiment of the invention the Cas protein is a type II CRISPR-Cas protein and in a preferred embodiment the Cas protein is a Cas protein. The invention further comprehends the coding for the Cas protein being codon optimized for expression in a eukaryotic cell. In a preferred embodiment the eukaryotic cell is a mammalian cell and in a more preferred embodiment the mammalian cell is a human cell. In a further embodiment of the invention, the expression of the gene product is decreased.

[1287] In another aspect, the invention provides an engineered, non-naturally occurring vector system comprising one or more vectors comprising a first regulatory element operably linked to a CRISPR-Cas system guide RNA that targets a DNA molecule encoding a gene product and a AAV-Cas protein. The components may be located on same or different vectors of the system, or may be the same vector whereby the AAV-Cas protein also delivers the RNA of the CRISPR system. The guide RNA targets the DNA molecule encoding the gene product in a cell and the AAV-Cas protein may cleaves the DNA molecule encoding the gene product (it may cleave one or both strands or have substantially no nuclease activity), whereby expression of the gene product is altered; and, wherein the AAV-Cas protein and the guide RNA do not naturally occur together. The invention comprehends the guide RNA comprising a guide sequence fused to a tracr sequence. In an embodiment of the invention the AAV-Cas protein is a type II AAV-CRISPR-Cas protein and in a preferred embodiment the AAV-Cas protein is a AAV-Cas protein. The invention further comprehends the coding for the AAV-Cas protein being codon optimized for expression in a eukaryotic cell. In a preferred embodiment the eukaryotic cell is a mammalian cell and in a more preferred embodiment the mammalian cell is a human cell. In a further embodiment of the invention, the expression of the gene product is decreased.

[1288] In another aspect, the invention provides a method of expressing an effector protein and guide RNA in a cell comprising introducing the vector according any of the vector delivery systems disclosed herein. In an embodiment of the vector for delivering an effector protein, the minimal promoter is the Mecp2 promoter, tRNA promoter, or U6. In a further embodiment, the minimal promoter is tissue specific.

[1289] The one or more polynucleotide molecules may be comprised within one or more vectors. The invention comprehends such polynucleotide molecule(s), for instance such polynucleotide molecules operably configured to express the protein and/or the nucleic acid component(s), as well as such vector(s).

[1290] In one aspect, the invention provides a vector system comprising one or more vectors. In some embodiments, the system comprises: (a) a first regulatory element operably linked to a tracr mate sequence and one or more insertion sites for inserting one or more guide sequences upstream of the tracr mate sequence, wherein when expressed, the guide sequence directs sequence-specific binding of a AAV-CRISPR complex to a target sequence in a eukaryotic cell, wherein the CRISPR complex comprises a AAV-CRISPR enzyme complexed with (1) the guide sequence that is hybridized to the target sequence, and (2) the tracr mate sequence that is hybridized to the tracr sequence; and (b) said AAV-CRISPR enzyme comprising at least one nuclear localization sequence and/or at least one NES; wherein components (a) and (b) are located on or in the same or different vectors of the system. In some embodiments, component (a) further comprises the tracr sequence downstream of the tracr mate sequence under the control of the first regulatory element. In some embodiments, component (a) further comprises two or more guide sequences operably linked to the first regulatory element, wherein when expressed, each of the two or more guide sequences direct sequence specific binding of a AAV-CRISPR complex to a different target sequence in a eukaryotic cell. In some embodiments, the system comprises the tracr sequence under the control of a third regulatory element, such as a polymerase III promoter. In some embodiments, the tracr sequence exhibits at least 50%, 60%, 70%, 80%, 90%, 95%, or 99% of sequence complementarity along the length of the tracr mate sequence when optimally aligned. Determining optimal alignment is within the purview of one of skill in the art. For example, there are publically and commercially available alignment algorithms and programs such as, but not limited to, ClustalW, Smith-Waterman in matlab, Bowtie, Geneious, Biopython and SeqMan. In some embodiments, the AAV-CRISPR complex comprises one or more nuclear localization sequences of sufficient strength to drive accumulation of said CRISPR complex in a detectable amount in the nucleus of a eukaryotic cell. Without wishing to be bound by theory, it is believed that a nuclear localization sequence is not necessary for AAV-CRISPR complex activity in eukaryotes, but that including such sequences enhances activity of the system, especially as to targeting nucleic acid molecules in the nucleus and/or having molecules exit the nucleus. In some embodiments, the AAV-CRISPR enzyme is a type II AAV-CRISPR system enzyme. In some embodiments, the AAV-CRISPR enzyme is a AAV-Cas enzyme. In some embodiments, the AAV-Cas enzyme is derived from S. mutans, S. agalactiae, S. equisimilis, S. sanguinis, S. pneumonia; C. jejuni, C. coli; N. salsuginis, N. tergarcus; S. auricularis, S. carnosus; N. meningitides, N. gonorrhoeae; L. monocytogenes, L. ivanovii; C. botulinum, C. difficile, C. tetani, C. sordellii; Francisella tularensis 1, Prevotella albensis, Lachnospiraceae bacterium MC2017 1, Butyrivibrio proteoclasticus, Peregrinibacteria bacterium GW2011 GWA2_33_10, Parcubacteria bacterium GW2011 GWC2_44_17, Smithella sp. SCADC, Acidaminococcus sp. BV3L6, Lachnospiraceae bacterium MA2020, Candidatus Methanoplasma termitum, Eubacterium eligens, Moraxella bovoculi 237, Leptospira inadai, Lachnospiraceae bacterium ND2006, Porphyromonas crevioricanis 3, Prevotella disiens and Porphyromonas macacae (e.g., a Cas of one of these organisms modified to have or be associated with at least one AAV), and may include further mutations or alterations or be a chimeric Cas. The enzyme may be a AAV-Cas homolog or ortholog. In some embodiments, the AAV-CRISPR enzyme is codon-optimized for expression in a eukaryotic cell. In some embodiments, the AAV-CRISPR enzyme directs cleavage of one or two strands at the location of the target sequence. In some embodiments, the AAV-CRISPR enzyme lacks DNA strand cleavage activity. In some embodiments, the first regulatory element is a polymerase III promoter. In some embodiments, the second regulatory element is a polymerase II promoter. In some embodiments, the guide sequence is at least 15, 16, 17, 18, 19, 20, 25 nucleotides, or between 10-30, or between 15-25, or between 15-20 nucleotides in length. In general, and throughout this specification, the term “vector” refers to a nucleic acid molecule capable of transporting another nucleic acid to which it has been linked. Vectors include, but are not limited to, nucleic acid molecules that are single-stranded, double-stranded, or partially double-stranded; nucleic acid molecules that comprise one or more free ends, no free ends (e.g., circular); nucleic acid molecules that comprise DNA, RNA, or both; and other varieties of polynucleotides known in the art. One type of vector is a “plasmid,” which refers to a circular double stranded DNA loop into which additional DNA segments can be inserted, such as by standard molecular cloning techniques. Another type of vector is a viral vector, wherein virally-derived DNA or RNA sequences are present in the vector for packaging into a virus (e.g., retroviruses, replication defective retroviruses, adenoviruses, replication defective adenoviruses, and adeno-associated viruses). Viral vectors also include polynucleotides carried by a virus for transfection into a host cell. Certain vectors are capable of autonomous replication in a host cell into which they are introduced (e.g., bacterial vectors having a bacterial origin of replication and episomal mammalian vectors). Other vectors (e.g., non-episomal mammalian vectors) are integrated into the genome of a host cell upon introduction into the host cell, and thereby are replicated along with the host genome. Moreover, certain vectors are capable of directing the expression of genes to which they are operatively-linked. Such vectors are referred to herein as “expression vectors.” Common expression vectors of utility in recombinant DNA techniques are often in the form of plasmids.

[1291] Recombinant expression vectors can comprise a nucleic acid of the invention in a form suitable for expression of the nucleic acid in a host cell, which means that the recombinant expression vectors include one or more regulatory elements, which may be selected on the basis of the host cells to be used for expression, that is operatively-linked to the nucleic acid sequence to be expressed. Within a recombinant expression vector, “operably linked” is intended to mean that the nucleotide sequence of interest is linked to the regulatory element(s) in a manner that allows for expression of the nucleotide sequence (e.g., in an in vitro transcription/translation system or in a host cell when the vector is introduced into the host cell). Again, the RNA of the CRISPR System, while advantageously delivered via the AAV-CRISPR enzyme can also be delivered separately, e.g. via a separate vector.

[1292] In one aspect, the invention provides an AAV-CRISPR enzyme comprising one or more nuclear localization sequences and/or NES. In some embodiments, said AAV-CRISPR enzyme includes a regulatory element that drives transcription of component(s) of the CRISPR system (e.g., RNA, such as guide RNA and/or HR template nucleic acid molecule) in a eukaryotic cell such that said AAV-CRISPR enzyme delivers the CRISPR system accumulates in a detectable amount in the nucleus of the eukaryotic cell and/or is exported from the nucleus. In some embodiments, the regulatory element is a polymerase II promoter. In some embodiments, the AAV-CRISPR enzyme is a type II AAV-CRISPR system enzyme. In some embodiments, the AAV-CRISPR enzyme is a AAV-Cas enzyme. In some embodiments, the AAV-Cas enzyme is derived from S. mutans, S. agalactiae, S. equisimilis, S. sanguinis, S. pneumonia; C. jejuni, C. coli; N. salsuginis, N. tergarcus; S. auricularis, S. carnosus; N. meningitides, N. gonorrhoeae; L. monocytogenes, L. ivanovii; C. botulinum, C. difficile, C. tetani, C. sordellii; Francisella tularensis 1, Prevotella albensis, Lachnospiraceae bacterium MC2017 1, Butyrivibrio proteoclasticus, Peregrinibacteria bacterium GW2011_GWA2_33_10, Parcubacteria bacterium GW2011_GWC2_44_17, Smithella sp. SCADC, Acidaminococcus sp. BV3L6, Lachnospiraceae bacterium MA2020, Candidatus Methanoplasma termitum, Eubacterium eligens, Moraxella bovoculi 237, Leptospira inadai, Lachnospiraceae bacterium ND2006, Porphyromonas crevioricanis 3, Prevotella disiens and Porphyromonas macacae (e.g., Cas modified to have or be associated with at least one AAV), and may include further alteration or mutation of the Cas, and can be a chimeric Cas. In some embodiments, the AAV-CRISPR enzyme is codon-optimized for expression in a eukaryotic cell. In some embodiments, the AAV-CRISPR enzyme directs cleavage of one or two strands at the location of the target sequence. In some embodiments, the AAV-CRISPR enzyme lacks or substantially DNA strand cleavage activity (e.g., no more than 5% nuclease activity as compared with a wild type enzyme or enzyme not having the mutation or alteration that decreases nuclease activity).

[1293] In one aspect, the invention provides a AAV-CRISPR enzyme comprising one or more nuclear localization sequences of sufficient strength to drive accumulation of said AAV-CRISPR enzyme in a detectable amount in the nucleus of a eukaryotic cell. In some embodiments, the AAV-CRISPR enzyme is a type II AAV-CRISPR system enzyme. In some embodiments, the AAV-CRISPR enzyme is a AAV-Cas enzyme. In some embodiments, the AAV-Cas enzyme is derived from S. mutans, S. agalactiae, S. equisimilis, S. sanguinis, S. pneumonia; C. jejuni, C. coli; N. salsuginis, N. tergarcus; S. auricularis, S. carnosus; N. meningitides, N. gonorrhoeae; L. monocytogenes, L. ivanovii; C. botulinum, C. difficile, C. tetani, C. sordellii; Francisella tularensis 1, Prevotella albensis, Lachnospiraceae bacterium MC2017 1, Butyrivibrio proteoclasticus, Peregrinibacteria bacterium GW2011_GWA2_33_10, Parcubacteria bacterium GW2011_GWC2_44_17, Smithella sp. SCADC, Acidaminococcus sp. BV3L6, Lachnospiraceae bacterium MA2020, Candidatus Methanoplasma termitum, Eubacterium eligens, Moraxella bovoculi 237, Leptospira inadai, Lachnospiraceae bacterium ND2006, Porphyromonas crevioricanis 3, Prevotella disiens and Porphyromonas macacae (e.g., Cas modified to have or be associated with at least one AAV), and may include further alteration or mutation of the Cas, and can be a chimeric Cas. In some embodiments, the AAV-CRISPR enzyme is codon-optimized for expression in a eukaryotic cell. In some embodiments, the AAV-CRISPR enzyme directs cleavage of one or two strands at the location of the target sequence. In some embodiments, the AAV-CRISPR enzyme lacks or substantially DNA strand cleavage activity (e.g., no more than 5% nuclease activity as compared with a wild type enzyme or enzyme not having the mutation or alteration that decreases nuclease activity).

[1294] In one aspect, the invention provides a eukaryotic host cell comprising (a) a first regulatory element operably linked to a tracr mate sequence and one or more insertion sites for inserting one or more guide sequences upstream of the tracr mate sequence, wherein when expressed, the guide sequence directs sequence-specific binding of a AAV-CRISPR complex to a target sequence in a eukaryotic cell, wherein the AAV-CRISPR complex comprises a AAV-CRISPR enzyme complexed with (1) the guide sequence that is hybridized to the target sequence, and (2) the tracr mate sequence that is hybridized to the tracr sequence; and/or (b) a said AAV-CRISPR enzyme optionally comprising at least one nuclear localization sequence and/or NES. In some embodiments, the host cell comprises components (a) and (b). In some embodiments, component (a), component (b), or components (a) and (b) are stably integrated into a genome of the host eukaryotic cell. In some embodiments, component (b) includes or contains component (a). In some embodiments, component (a) further comprises the tracr sequence downstream of the tracr mate sequence under the control of the first regulatory element. In some embodiments, component (a) further comprises two or more guide sequences operably linked to the first regulatory element, wherein when expressed, each of the two or more guide sequences direct sequence specific binding of a AAV-CRISPR complex to a different target sequence in a eukaryotic cell. In some embodiments, the eukaryotic host cell further comprises a third regulatory element, such as a polymerase III promoter, operably linked to said tracr sequence. In some embodiments, the tracr sequence exhibits at least 50%, 60%, 70%, 80%, 90%, 95%, or 99% of sequence complementarity along the length of the tracr mate sequence when optimally aligned. In some embodiments, the AAV-CRISPR enzyme comprises one or more nuclear localization sequences and/or nuclear export sequences of sufficient strength to drive accumulation of said CRISPR enzyme in a detectable amount in of the nucleus of a eukaryotic cell. In some embodiments, the AAV-CRISPR enzyme is a type II CRISPR system enzyme. In some embodiments, the CRISPR enzyme is a Cas enzyme. In some embodiments, the AAV-Cas enzyme is derived from S. mutans, S. agalactiae, S. equisimilis, S. sanguinis, S. pneumonia; C. jejuni, C. coli; N. salsuginis, N. tergarcus; S. auricularis, S. carnosus; N. meningitides, N. gonorrhoeae; L. monocytogenes, L. ivanovii; C. botulinum, C. difficile, C. tetani, C. sordellii; Francisella tularensis 1, Prevotella albensis, Lachnospiraceae bacterium MC2017 1, Butyrivibrio proteoclasticus, Peregrinibacteria bacterium GW2011_GWA2_33_10, Parcubacteria bacterium GW2011_GWC2_44_17, Smithella sp. SCADC, Acidaminococcus sp. BV3L6, Lachnospiraceae bacterium MA2020, Candidatus Methanoplasma termitum, Eubacterium eligens, Moraxella bovoculi 237, Leptospira inadai, Lachnospiraceae bacterium ND2006, Porphyromonas crevioricanis 3, Prevotella disiens and Porphyromonas macacae (e.g., Cas modified to have or be associated with at least one AAV), and may include further alteration or mutation of the Cas, and can be a chimeric Cas. In some embodiments, the AAV-CRISPR enzyme is codon-optimized for expression in a eukaryotic cell. In some embodiments, the AAV-CRISPR enzyme directs cleavage of one or two strands at the location of the target sequence. In some embodiments, the AAV-CRISPR enzyme lacks or substantially DNA strand cleavage activity (e.g., no more than 5% nuclease activity as compared with a wild type enzyme or enzyme not having the mutation or alteration that decreases nuclease activity). In some embodiments, the first regulatory element is a polymerase III promoter. In some embodiments, the second regulatory element is a polymerase II promoter. In some embodiments, the guide sequence is at least 15, 16, 17, 18, 19, 20, 25 nucleotides, or between 10-30, or between 15-25, or between 15-20 nucleotides in length. In an aspect, the invention provides a non-human eukaryotic organism; preferably a multicellular eukaryotic organism, comprising a eukaryotic host cell according to any of the described embodiments. In other aspects, the invention provides a eukaryotic organism; preferably a multicellular eukaryotic organism, comprising a eukaryotic host cell according to any of the described embodiments. The organism in some embodiments of these aspects may be an animal; for example a mammal. Also, the organism may be an arthropod such as an insect. The organism also may be a plant. Further, the organism may be a fungus. Advantageously the organism is a host of AAV.

[1295] In one aspect, the invention provides a kit comprising one or more of the components described herein. In some embodiments, the kit comprises a vector system and instructions for using the kit. In some embodiments, the vector system comprises (a) a first regulatory element operably linked to a tracr mate sequence and one or more insertion sites for inserting one or more guide sequences upstream of the tracr mate sequence, wherein when expressed, the guide sequence directs sequence-specific binding of a CRISPR complex to a target sequence in a eukaryotic cell, wherein the CRISPR complex comprises a CRISPR enzyme complexed with (1) the guide sequence that is hybridized to the target sequence, and (2) the tracr mate sequence that is hybridized to the tracr sequence; and/or (b) said AAV-CRISPR enzyme optionally comprising a nuclear localization sequence. In some embodiments, the kit comprises components (a) and (b) located on or in the same or different vectors of the system, e.g., (a) can be contained in (b). In some embodiments, component (a) further comprises the tracr sequence downstream of the tracr mate sequence under the control of the first regulatory element. In some embodiments, component (a) further comprises two or more guide sequences operably linked to the first regulatory element, wherein when expressed, each of the two or more guide sequences direct sequence specific binding of a CRISPR complex to a different target sequence in a eukaryotic cell. In some embodiments, the system further comprises a third regulatory element, such as a polymerase III promoter, operably linked to said tracr sequence. In some embodiments, the tracr sequence exhibits at least 50%, 60%, 70%, 80%, 90%, 95%, or 99% of sequence complementarity along the length of the tracr mate sequence when optimally aligned. In some embodiments, the CRISPR enzyme comprises one or more nuclear localization sequences of sufficient strength to drive accumulation of said CRISPR enzyme in a detectable amount in the nucleus of a eukaryotic cell. In some embodiments, the CRISPR enzyme is a type II CRISPR system enzyme. In some embodiments, the CRISPR enzyme is a Cas enzyme. In some embodiments, the Cas enzyme is derived from S. mutans, S. agalactiae, S. equisimilis, S. sanguinis, S. pneumonia; C. jejuni, C. coli; N. salsuginis, N. tergarcus; S. auricularis, S. carnosus; N. meningitides, N. gonorrhoeae; L. monocytogenes, L. ivanovii; C. botulinum, C. difficile, C. tetani, C. sordellii; Francisella tularensis 1, Prevotella albensis, Lachnospiraceae bacterium MC2017 1, Butyrivibrio proteoclasticus, Peregrinibacteria bacterium GW2011_GWA2_33_10, Parcubacteria bacterium GW2011_GWC2_44_17, Smithella sp. SCADC, Acidaminococcus sp. BV3L6, Lachnospiraceae bacterium MA2020, Candidatus Methanoplasma termitum, Eubacterium eligens, Moraxella bovoculi 237, Leptospira inadai, Lachnospiraceae bacterium ND2006, Porphyromonas crevioricanis 3, Prevotella disiens and Porphyromonas macacae (e.g., Cas modified to have or be associated with at least one AAV), and may include further alteration or mutation of the Cas, and can be a chimeric Cas. In some embodiments, the coding for the AAV-CRISPR enzyme is codon-optimized for expression in a eukaryotic cell. In some embodiments, the AAV-CRISPR enzyme directs cleavage of one or two strands at the location of the target sequence. In some embodiments, the AAV-CRISPR enzyme lacks or substantially DNA strand cleavage activity (e.g., no more than 5% nuclease activity as compared with a wild type enzyme or enzyme not having the mutation or alteration that decreases nuclease activity). In some embodiments, the first regulatory element is a polymerase III promoter. In some embodiments, the second regulatory element is a polymerase II promoter. In some embodiments, the guide sequence is at least 15, 16, 17, 18, 19, 20, 25 nucleotides, or between 10-30, or between 15-25, or between 15-20 nucleotides in length.

[1296] In one aspect, the invention provides a method of modifying a target polynucleotide in a eukaryotic cell. In some embodiments, the method comprises allowing a AAV-CRISPR complex to bind to the target polynucleotide, e.g., to effect cleavage of said target polynucleotide, thereby modifying the target polynucleotide, wherein the AAV-CRISPR complex comprises a AAV-CRISPR enzyme complexed with a guide sequence hybridized to a target sequence within said target polynucleotide, wherein said guide sequence is linked to a tracr mate sequence which in turn hybridizes to a tracr sequence. In some embodiments, said cleavage comprises cleaving one or two strands at the location of the target sequence by said AAV-CRISPR enzyme. In some embodiments, said cleavage results in decreased transcription of a target gene. In some embodiments, the method further comprises repairing said cleaved target polynucleotide by homologous recombination with an exogenous template polynucleotide, wherein said repair results in a mutation comprising an insertion, deletion, or substitution of one or more nucleotides of said target polynucleotide. In some embodiments, said mutation results in one or more amino acid changes in a protein expressed from a gene comprising the target sequence. In some embodiments, the method further comprises delivering one or more vectors to said eukaryotic cell, wherein one or more vectors comprise the AAV-CRISPR enzyme and one or more vectors drive expression of one or more of: the guide sequence linked to the tracr mate sequence, and the tracr sequence. In some embodiments, said AAV-CRISPR enzyme drive expression of one or more of: the guide sequence linked to the tracr mate sequence, and the tracr sequence. In some embodiments such AAV-CRISPR enzyme are delivered to the eukaryotic cell in a subject. In some embodiments, said modifying takes place in said eukaryotic cell in a cell culture. In some embodiments, the method further comprises isolating said eukaryotic cell from a subject prior to said modifying. In some embodiments, the method further comprises returning said eukaryotic cell and/or cells derived therefrom to said subject.

[1297] In one aspect, the invention provides a method of modifying expression of a polynucleotide in a eukaryotic cell. In some embodiments, the method comprises allowing a AAV-CRISPR complex to bind to the polynucleotide such that said binding results in increased or decreased expression of said polynucleotide; wherein the AAV-CRISPR complex comprises a AAV-CRISPR enzyme complexed with a guide sequence hybridized to a target sequence within said polynucleotide, wherein said guide sequence is linked to a tracr mate sequence which in turn hybridizes to a tracr sequence. In some embodiments, the method further comprises delivering one or more vectors to said eukaryotic cells, wherein the one or more vectors are the AAV-CRISPR enzyme and/or drive expression of one or more of: the guide sequence linked to the tracr mate sequence, and the tracr sequence.

[1298] In one aspect, the invention provides a method of generating a model eukaryotic cell comprising a mutated disease gene. In some embodiments, a disease gene is any gene associated an increase in the risk of having or developing a disease. In some embodiments, the method comprises (a) introducing one or more vectors into a eukaryotic cell, wherein the one or more vectors comprise the AAV-CRISPR enzyme and/or drive expression of one or more of: a guide sequence linked to a tracr mate sequence, and a tracr sequence; and (b) allowing a AAV-CRISPR complex to bind to a target polynucleotide, e.g., to effect cleavage of the target polynucleotide within said disease gene, wherein the AAV-CRISPR complex comprises the AAV-CRISPR enzyme complexed with (1) the guide sequence that is hybridized to the target sequence within the target polynucleotide, and (2) the tracr mate sequence that is hybridized to the tracr sequence, thereby generating a model eukaryotic cell comprising a mutated disease gene. Thus, in some embodiments the AAV-CRISPR enzyme contains nucleic acid molecules for and drives expression of one or more of: a guide sequence linked to a tracr mate sequence, and a tracr sequence and/or a Homologous Recombination template and/or a stabilizing ligand if the CRISPR enzyme has a destabilization domain. In some embodiments, said cleavage comprises cleaving one or two strands at the location of the target sequence by said AAV-CRISPR enzyme. In some embodiments, said cleavage results in decreased transcription of a target gene. In some embodiments, the method further comprises repairing said cleaved target polynucleotide by homologous recombination with an exogenous template polynucleotide, wherein said repair results in a mutation comprising an insertion, deletion, or substitution of one or more nucleotides of said target polynucleotide. In some embodiments, said mutation results in one or more amino acid changes in a protein expression from a gene comprising the target sequence.

[1299] In one aspect, the invention provides a method for developing a biologically active agent that modulates a cell signaling event associated with a disease gene. In some embodiments, a disease gene is any gene associated an increase in the risk of having or developing a disease. In some embodiments, the method comprises (a) contacting a test compound with a model cell of any one of the described embodiments; and (b) detecting a change in a readout that is indicative of a reduction or an augmentation of a cell signaling event associated with said mutation in said disease gene, thereby developing said biologically active agent that modulates said cell signaling event associated with said disease gene.

[1300] In one aspect, the invention provides a recombinant polynucleotide comprising a guide sequence upstream of a tracr mate sequence, wherein the guide sequence when expressed directs sequence-specific binding of a AAV-CRISPR complex to a corresponding target sequence present in a eukaryotic cell. The polynucleotide can be carried within and expressed in vivo from the AAV-CRISPR enzyme. In some embodiments, the target sequence is a viral sequence present in a eukaryotic cell. In some embodiments, the target sequence is a proto-oncogene or an oncogene.

[1301] In one aspect the invention provides for a method of selecting one or more cell(s) by introducing one or more mutations in a gene in the one or more cell (s), the method comprising: introducing one or more vectors into the cell (s), wherein the one or more vectors comprise a AAV-CRISPR enzyme and/or drive expression of one or more of: a guide sequence linked to a tracr mate sequence, a tracr sequence, and an editing template; wherein, for example that which is being expressed is within and expressed in vivo by the AAV-CRISPR enzyme and/or the editing template comprises the one or more mutations that abolish AAV-CRISPR enzyme cleavage; allowing homologous recombination of the editing template with the target polynucleotide in the cell(s) to be selected; allowing a CRISPR complex to bind to a target polynucleotide to effect cleavage of the target polynucleotide within said gene, wherein the AAV-CRISPR complex comprises the AAV-CRISPR enzyme complexed with (1) the guide sequence that is hybridized to the target sequence within the target polynucleotide, and (2) the tracr mate sequence that is hybridized to the tracr sequence, wherein binding of the AAV-CRISPR complex to the target polynucleotide induces cell death, thereby allowing one or more cell(s) in which one or more mutations have been introduced to be selected. In a preferred embodiment, the AAV-CRISPR enzyme is AAV-Cas. In another aspect of the invention the cell to be selected may be a eukaryotic cell. Aspects of the invention allow for selection of specific cells without requiring a selection marker or a two-step process that may include a counter-selection system. The cell(s) may be prokaryotic or eukaryotic cells.

[1302] With respect to mutations of the AAV-CRISPR enzyme, mutations may be made at any or all residues corresponding to positions 908, 993, and 1263 with reference to amino acid position numbering of AsCpf1 (which may be ascertained for instance by standard sequence comparison tools), or 917 and 1006 with reference to amino acid numbering of FnCpf1, or 832, 925, 947, 1180 with reference to amino acid position numbering of LbCpf1. In particular, any or all of the following mutations are preferred in AsCpf1: D908A, E993A, and D1263; in FnCpf1: D917A and H1006A; in LbCpf1: D832A, E925A, D947A, and D1180A; as well as conservative substitution for any of the replacement amino acids is also envisaged. In an aspect the invention provides as to any or each or all embodiments herein-discussed wherein the AAV-CRISPR enzyme comprises at least one or more, or at least two or more mutations, wherein the at least one or more mutation or the at least two or more mutations is as to D908, E993, or D1263 according to AsCpf1 protein, e.g., D908A, E993A, or D1263 as to AsCpf1, or D917 or H1006 according to FnCpf1, e.g., D917A or H1006A as to FnCpf1, or D832, E925, D947, or D1180 according to LbCpf1, e.g., D832A, E925A, D947A, or D1180A as to LbCpf1, or any corresponding mutation(s) in a Cpf1 of an ortholog to As or Fn or Lb, or the CRISPR enzyme comprises at least one mutation wherein at least D908A, E993A, or D1263 as to AsCpf1 or D917A or H1006A as to FnCpf1 or D832A, E925A, D947A, or D1180A as to LbCpf1 is mutated; or any corresponding mutation(s) in a Cpf1 of an ortholog to As protein or Fn protein or Lb protein.

[1303] Aspects of the invention encompass a non-naturally occurring or engineered composition that may comprise a guide RNA (sgRNA) comprising a guide sequence capable of hybridizing to a target sequence in a genomic locus of interest in a cell and a AAV-CRISPR enzyme that may comprise at least one or more nuclear localization sequences, wherein the AAV-CRISPR enzyme comprises one or two or more mutations, such that the enzyme has altered or diminished nuclease activity compared with the wild type enzyme, wherein at least one loop of the sgRNA is modified by the insertion of distinct RNA sequence(s) that bind to one or more adaptor proteins, and wherein the adaptor protein further recruits one or more heterologous functional domains. In an embodiment of the invention the AAV-CRISPR enzyme comprises one or two or more mutations in a residue selected from the group comprising, consisting essentially of, or consisting of D908, E993, or D1263 according to AsCpf1 protein; D917 or H1006 according to FnCpf1; or D832, E925, D947, or D1180 according to LbCpf1. In a further embodiment the AAV-CRISPR enzyme comprises one or two or more mutations selected from the group comprising D908A, E993A, or D1263 as to AsCpf1; D917A or H1006A as to FnCpf1; or D832A, E925A, D947A, or D1180A as to LbCpf1. In another embodiment, the functional domain comprise, consist essentially of a transcriptional activation domain, e.g., VP64. In another embodiment, the functional domain comprise, consist essentially of a transcriptional repressor domain, e.g., KRAB domain, SID domain or a SID4X domain. In embodiments of the invention, the one or more heterologous functional domains have one or more activities selected from the group comprising, consisting essentially of, or consisting of methylase activity, demethylase activity, transcription activation activity, transcription repression activity, transcription release factor activity, histone modification activity, RNA cleavage activity and nucleic acid binding activity. In further embodiments of the invention the cell is a eukaryotic cell or a mammalian cell or a human cell. In another embodiment, the at least one loop of the sgRNA is tetraloop and/or loop2. An aspect of the invention encompasses methods of modifying a genomic locus of interest to change gene expression in a cell by introducing into the cell any of the compositions described herein. An aspect of the invention is that the above elements are comprised in a single composition or comprised in individual compositions, e.g., the AAV-CRISPR enzyme delivers the enzyme as discussed as well as the guide. These compositions may advantageously be applied to a host to elicit a functional effect on the genomic level. In general, the sgRNA are modified in a manner that provides specific binding sites (e.g., aptamers) for adapter proteins comprising one or more functional domains (e.g., via fusion protein) to bind to. The modified sgRNA are modified such that once the sgRNA forms a AAV-CRISPR complex (i.e. AAV-CRISPR enzyme binding to sgRNA and target) the adapter proteins bind and, the functional domain on the adapter protein is positioned in a spatial orientation which is advantageous for the attributed function to be effective. For example, if the functional domain comprise, consist essentially of a transcription activator (e.g., VP64 or p65), the transcription activator is placed in a spatial orientation which allows it to affect the transcription of the target. Likewise, a transcription repressor will be advantageously positioned to affect the transcription of the target and a nuclease (e.g., Fok1) will be advantageously positioned to cleave or partially cleave the target. Again, the AAV-CRISPR enzyme can deliver both the enzyme and the modified guide. The skilled person will understand that modifications to the sgRNA which allow for binding of the adapter+functional domain but not proper positioning of the adapter+functional domain (e.g., due to steric hindrance within the three dimensional structure of the CRISPR complex) are modifications which are not intended. The one or more modified sgRNA may be modified at the tetra loop, the stem loop 1, stem loop 2, or stem loop 3, as described herein, preferably at either the tetra loop or stem loop 2, and most preferably at both the tetra loop and stem loop 2.

[1304] As explained herein the functional domains may be, for example, one or more domains from the group comprising, consisting essentially of, or consisting of methylase activity, demethylase activity, transcription activation activity, transcription repression activity, transcription release factor activity, histone modification activity, RNA cleavage activity, DNA cleavage activity, nucleic acid binding activity, and molecular switches (e.g., light inducible). In some cases it is advantageous that additionally at least one NLS is provided. In some instances, it is advantageous to position the NLS at the N terminus. When more than one functional domain is included, the functional domains may be the same or different.

[1305] The sgRNA may be designed to include multiple binding recognition sites (e.g., aptamers) specific to the same or different adapter protein. The sgRNA may be designed to bind to the promoter region −1000-+1 nucleic acids upstream of the transcription start site (i.e. TSS), preferably −200 nucleic acids. This positioning improves functional domains which affect gene activation (e.g., transcription activators) or gene inhibition (e.g., transcription repressors). The modified sgRNA may be one or more modified sgRNAs targeted to one or more target loci (e.g., at least 1 sgRNA, at least 2 sgRNA, at least 5 sgRNA, at least 10 sgRNA, at least 20 sgRNA, at least 30 sg RNA, at least 50 sgRNA) comprised in a composition.

[1306] Further, the AAV-CRISPR enzyme with diminished nuclease activity is most effective when the nuclease activity is inactivated (e.g., nuclease inactivation of at least 70%, at least 80%, at least 90%, at least 95%, at least 97%, or 100% as compared with the wild type enzyme; or to put in another way, a AAV-Cas enzyme or AAV-CRISPR enzyme having advantageously about 0% of the nuclease activity of the non-mutated or wild type Cas enzyme or CRISPR enzyme, or no more than about 3% or about 5% or about 10% of the nuclease activity of the non-mutated or wild type Cas enzyme or CRISPR enzyme). This is possible by introducing mutations into the RuvC and HNH nuclease domains of the AsCpf1 and orthologs thereof. For example utilizing mutations in a residue selected from the group comprising, consisting essentially of, or consisting of D908, E993, or D1263 according to AsCpf1 protein; D917 or H1006 according to FnCpf1; or D832, E925, D947, or D1180 according to LbCpf1, and more preferably introducing one or more of the mutations selected from the group comprising, consisting essentially of, or consisting of D908A, E993A, or D1263 as to AsCpf1; D917A or H1006A as to FnCpf1; or D832A, E925A, D947A, or D1180A as to LbCpf1. The inactivated CRISPR enzyme may have associated (e.g., via fusion protein) one or more functional domains, e.g., at least one destabilizing domain; or, for instance like those as described herein for the modified sgRNA adaptor proteins, including for example, one or more domains from the group comprising, consisting essentially of, or consisting of methylase activity, demethylase activity, transcription activation activity, transcription repression activity, transcription release factor activity, histone modification activity, RNA cleavage activity, DNA cleavage activity, nucleic acid binding activity, and molecular switches (e.g., light inducible). Preferred domains are Fok1, VP64, P65, HSF1, MyoD1. In the event that Fok1 is provided, it is advantageous that multiple Fok1 functional domains are provided to allow for a functional dimer and that sgRNAs are designed to provide proper spacing for functional use (Fok1) as specifically described in Tsai et al. Nature Biotechnology, Vol. 32, Number 6, June 2014). The adaptor protein may utilize known linkers to attach such functional domains. In some cases it is advantageous that additionally at least one NLS is provided. In some instances, it is advantageous to position the NLS at the N terminus. When more than one functional domain is included, the functional domains may be the same or different. In general, the positioning of the one or more functional domain on the inactivated AAV-CRISPR enzyme is one which allows for correct spatial orientation for the functional domain to affect the target with the attributed functional effect. For example, if the functional domain is a transcription activator (e.g., VP64 or p65), the transcription activator is placed in a spatial orientation which allows it to affect the transcription of the target. Likewise, a transcription repressor will be advantageously positioned to affect the transcription of the target, and a nuclease (e.g., Fok1) will be advantageously positioned to cleave or partially cleave the target. This may include positions other than the N-/C-terminus of the AAV-CRISPR enzyme. Positioning the functional domain in the Rec1 domain, the Rec2 domain, the HNH domain, or the PI domain of the AsCpf1 protein or any ortholog corresponding to these domains is advantageous; and again, it is mentioned that the functional domain can be a DD. Positioning of the functional domains to the Rec1 domain or the Rec2 domain, of the AsCpf1 protein or any ortholog corresponding to these domains, in some instances may be preferred. Fok1 functional domain may be attached at the N terminus. When more than one functional domain is included, the functional domains may be the same or different.

[1307] An adaptor protein may be any number of proteins that binds to an aptamer or recognition site introduced into the modified sgRNA and which allows proper positioning of one or more functional domains, once the sgRNA has been incorporated into the AAV-CRISPR complex, to affect the target with the attributed function. As explained in detail in this application such may be coat proteins, preferably bacteriophage coat proteins. The functional domains associated with such adaptor proteins (e.g., in the form of fusion protein) may include, for example, one or more domains from the group comprising, consisting essentially of, or consisting of methylase activity, demethylase activity, transcription activation activity, transcription repression activity, transcription release factor activity, histone modification activity, RNA cleavage activity, DNA cleavage activity, nucleic acid binding activity, and molecular switches (e.g., light inducible). Preferred domains are Fok1, VP64, P65, HSF1, MyoD1. In the event that the functional domain is a transcription activator or transcription repressor it is advantageous that additionally at least an NLS is provided and preferably at the N terminus. When more than one functional domain is included, the functional domains may be the same or different. The adaptor protein may utilize known linkers to attach such functional domains. Such linkers may be used to associate the AAV (e.g., capsid or VP2) with the CRISPR enzyme or have the CRISPR enzyme comprise the AAV (or vice versa).

[1308] Thus, sgRNA, e.g., modified sgRNA, the inactivated AAV-CRISPR enzyme (with or without functional domains), and the binding protein with one or more functional domains, may each individually be comprised in a composition and administered to a host individually or collectively. Alternatively, these components may be provided in a single composition for administration to a host, e.g., the AAV-CRISPR enzyme can deliver the RNA or guide or sgRNA or modified sgRNA and/or other components of the CRISPR system. Administration to a host may be performed via viral vectors, advantageously using the AAV-CRISPR enzyme as the delivery vehicle, although other vehicles can be used to deliver components other than the enzyme of the CRISPR system, and such viral vectors can be, for example, lentiviral vector, adenoviral vector, AAV vector. Several variations are appropriate to elicit a genomic locus event, including DNA cleavage, gene activation, or gene deactivation. Using the provided compositions, the person skilled in the art can advantageously and specifically target single or multiple loci with the same or different functional domains to elicit one or more genomic locus events. The compositions may be applied in a wide variety of methods for screening in libraries in cells and functional modeling in vivo (e.g., gene activation of lincRNA and identification of function; gain-of-function modeling; loss-of-function modeling; the use the compositions of the invention to establish cell lines and transgenic animals for optimization and screening purposes).

[1309] In an aspect, the invention provides a particle delivery system or the delivery system or the virus particle of any one of any one of the above embodiments or the cell of any one of the above embodiments for use in medicine or in therapy; or for use in a method of modifying an organism or a non-human organism by manipulation of a target sequence in a genomic locus associated with a disease or disorder; or for use in a method of treating or inhibiting a condition caused by one or more mutations in a genetic locus associated with a disease in a eukaryotic organism or a non-human organism; or for use in in vitro, ex vivo or in vivo gene or genome editing; or for use in in vitro, ex vivo or in vivo gene therapy.

[1310] In an aspect, the invention provides a pharmaceutical composition comprising the particle delivery system or the delivery system or the virus particle of any one of the above embodiment or the cell of any one of the above embodiment.

[1311] In an aspect, the invention provides a method of treating or inhibiting a condition or a disease caused by one or more mutations in a genomic locus in a eukaryotic organism or a non-human organism comprising manipulation of a target sequence within a coding, non-coding or regulatory element of said genomic locus in a target sequence in a subject or a non-human subject in need thereof comprising modifying the subject or a non-human subject by manipulation of the target sequence and wherein the condition or disease is susceptible to treatment or inhibition by manipulation of the target sequence comprising providing treatment comprising delivering a composition comprising the particle delivery system or the delivery system or the virus particle of any one of the above embodiment or the cell of any one of the above embodiment.

[1312] In an aspect, the invention provides use of the particle delivery system or the delivery system or the virus particle of any one of the above embodiment or the cell of any one of the above embodiment in ex vivo or in vivo gene or genome editing; or for use in in vitro, ex vivo or in vivo gene therapy.

[1313] In an aspect, the invention provides use of the particle delivery system or the delivery system or the virus particle of any one of the above embodiment or the cell of any one of the above embodiment in the manufacture of a medicament for in vitro, ex vivo or in vivo gene or genome editing or for use in in vitro, ex vivo or in vivo gene therapy or for use in a method of modifying an organism or a non-human organism by manipulation of a target sequence in a genomic locus associated with a disease or in a method of treating or inhibiting a condition or disease caused by one or more mutations in a genomic locus in a eukaryotic organism or a non-human organism.

[1314] In an aspect, the invention provides a method of individualized or personalized treatment of a genetic disease in a subject in need of such treatment comprising:

[1315] (a) introducing one or more mutations ex vivo in a tissue, organ or a cell line, or in vivo in a transgenic non-human mammal, comprising delivering to cell(s) of the tissue, organ, cell or mammal a composition comprising the particle delivery system or the delivery system or the virus particle of any one of the above embodiment or the cell of any one of the above embodiment, wherein the specific mutations or precise sequence substitutions are or have been correlated to the genetic disease;

[1316] (b) testing treatment(s) for the genetic disease on the cells to which the vector has been delivered that have the specific mutations or precise sequence substitutions correlated to the genetic disease; and

[1317] (c) treating the subject based on results from the testing of treatment(s) of step (b).

[1318] In an aspect, the invention provides a method of modeling a disease associated with a genomic locus in a eukaryotic organism or a non-human organism comprising manipulation of a target sequence within a coding, non-coding or regulatory element of said genomic locus comprising delivering a non-naturally occurring or engineered composition comprising a viral vector system comprising one or more viral vectors operably encoding a composition for expression thereof, wherein the composition comprises particle delivery system or the delivery system or the virus particle of any one of the above embodiments or the cell of any one of the above embodiment.

[1319] In an aspect, the method provides a method of modifying an organism or a non-human organism by manipulation of a target sequence in a genomic locus of interest comprising administering a composition comprising the particle delivery system or the delivery system or the virus particle of any one of the above embodiment or the cell of any one of the above embodiment.

[1320] In any of the described methods the strand break may be a single strand break or a double strand break.

[1321] Regulatory elements may comprise inducible promoters. Polynucleotides and/or vector systems may comprise inducible systems.

[1322] The invention also provides a vector system comprising one or more vectors, the one or more vectors comprising one or more polynucleotide molecules encoding components of a non-naturally occurring or engineered composition which is a composition having the characteristics as discussed herein or defined in any of the herein described methods.

[1323] The invention also provides a non-naturally occurring or engineered composition, or one or more polynucleotides encoding components of said composition, or vector systems comprising one or more polynucleotides encoding components of said composition for use in a therapeutic method of treatment. The therapeutic method of treatment may comprise gene or genome editing, or gene therapy.

[1324] The nucleic acids-targeting systems, the vector systems, the vectors and the compositions described herein may be used in various nucleic acids-targeting applications, altering or modifying synthesis of a gene product, such as a protein, nucleic acids cleavage, nucleic acids editing, nucleic acids splicing; trafficking of target nucleic acids, tracing of target nucleic acids, isolation of target nucleic acids, visualization of target nucleic acids, etc.

[1325] In general, and throughout this specification, the term “vector” refers to a nucleic acid molecule capable of transporting another nucleic acid to which it has been linked. Vectors include, but are not limited to, nucleic acid molecules that are single-stranded, double-stranded, or partially double-stranded; nucleic acid molecules that comprise one or more free ends, no free ends (e.g., circular); nucleic acid molecules that comprise DNA, RNA, or both; and other varieties of polynucleotides known in the art. One type of vector is a “plasmid,” which refers to a circular double stranded DNA loop into which additional DNA segments can be inserted, such as by standard molecular cloning techniques. Another type of vector is a viral vector, wherein virally-derived DNA or RNA sequences are present in the vector for packaging into a virus (e.g., retroviruses, replication defective retroviruses, adenoviruses, replication defective adenoviruses, and adeno-associated viruses). Viral vectors also include polynucleotides carried by a virus for transfection into a host cell. Certain vectors are capable of autonomous replication in a host cell into which they are introduced (e.g., bacterial vectors having a bacterial origin of replication and episomal mammalian vectors). Other vectors (e.g., non-episomal mammalian vectors) are integrated into the genome of a host cell upon introduction into the host cell, and thereby are replicated along with the host genome. Moreover, certain vectors are capable of directing the expression of genes to which they are operatively-linked. Such vectors are referred to herein as “expression vectors.” Vectors for and that result in expression in a eukaryotic cell can be referred to herein as “eukaryotic expression vectors.” Common expression vectors of utility in recombinant DNA techniques are often in the form of plasmids.

[1326] In certain embodiments, a vector system includes promoter-guide expression cassette in reverse order.

[1327] Recombinant expression vectors can comprise a nucleic acid of the invention in a form suitable for expression of the nucleic acid in a host cell, which means that the recombinant expression vectors include one or more regulatory elements, which may be selected on the basis of the host cells to be used for expression, that is operatively-linked to the nucleic acid sequence to be expressed. Within a recombinant expression vector, “operably linked” is intended to mean that the nucleotide sequence of interest is linked to the regulatory element(s) in a manner that allows for expression of the nucleotide sequence (e.g., in an in vitro transcription/translation system or in a host cell when the vector is introduced into the host cell).

[1328] Advantageous vectors include lentiviruses and adeno-associated viruses, and types of such vectors can also be selected for targeting particular types of cells.

[1329] In some embodiments, one or more vectors driving expression of one or more elements of a nucleic acid-targeting system are introduced into a host cell such that expression of the elements of the nucleic acid-targeting system direct formation of a nucleic acid-targeting complex at one or more target sites. For example, a nucleic acid-targeting effector module and a nucleic acid-targeting guide RNA could each be operably linked to separate regulatory elements on separate vectors. RNA(s) of the nucleic acid-targeting system can be delivered to a transgenic nucleic acid-targeting effector module animal or mammal, e.g., an animal or mammal that constitutively or inducibly or conditionally expresses nucleic acid-targeting effector module; or an animal or mammal that is otherwise expressing nucleic acid-targeting effector modules or has cells containing nucleic acid-targeting effector modules, such as by way of prior administration thereto of a vector or vectors that code for and express in vivo nucleic acid-targeting effector modules. Alternatively, two or more of the elements expressed from the same or different regulatory elements, may be combined in a single vector, with one or more additional vectors providing any components of the nucleic acid-targeting system not included in the first vector. nucleic acid-targeting system elements that are combined in a single vector may be arranged in any suitable orientation, such as one element located 5′ with respect to (“upstream” of) or 3′ with respect to (“downstream” of) a second element. The coding sequence of one element may be located on the same or opposite strand of the coding sequence of a second element, and oriented in the same or opposite direction. In some embodiments, a single promoter drives expression of a transcript encoding a nucleic acid-targeting effector module and the nucleic acid-targeting guide RNA, embedded within one or more intron sequences (e.g., each in a different intron, two or more in at least one intron, or all in a single intron). In some embodiments, the nucleic acid-targeting effector module and the nucleic acid-targeting guide RNA may be operably linked to and expressed from the same promoter.

[1330] In an aspect, the invention provides in a vector system comprising one or more vectors, wherein the one or more vectors comprises:

[1331] a) a first regulatory element operably linked to a nucleotide sequence encoding the engineered CRISPR protein as defined herein; and optionally

[1332] b) a second regulatory element operably linked to one or more nucleotide sequences encoding one or more nucleic acid molecules comprising a guide RNA comprising a guide sequence, a direct repeat sequence, optionally wherein components (a) and (b) are located on same or different vectors.

[1333] The invention also provides an engineered, non-naturally occurring Clustered Regularly Interspersed Short Palindromic Repeats (CRISPR)-CRISPR associated (Cas effector module) (CRISPR-Cas effector module) vector system comprising one or more vectors comprising:

[1334] a) a first regulatory element operably linked to a nucleotide sequence encoding a non-naturally-occurring CRISPR enzyme of any one of the inventive constructs herein; and

[1335] b) a second regulatory element operably linked to one or more nucleotide sequences encoding one or more of the guide RNAs, the guide RNA comprising a guide sequence, a direct repeat sequence,

[1336] wherein:
[1337] components (a) and (b) are located on same or different vectors,
   [1338] the CRISPR complex is formed;
   [1339] the guide RNA targets the target polynucleotide loci and the enzyme alters the polynucleotide loci, and
   [1340] the enzyme in the CRISPR complex has reduced capability of modifying one or more off-target loci as compared to an unmodified enzyme and/or whereby the enzyme in the CRISPR complex has increased capability of modifying the one or more target loci as compared to an unmodified enzyme.

[1341] As used herein, a CRISPR Cas effector module or CRISRP effector module includes, but is not limited to, Cas9, Cpf1, C2c2, Group 13b, and C2c1. In some embodiments, the CRISPR-Cas effector module may be engineered.

[1342] In such a system, component (II) may comprise a first regulatory element operably linked to a polynucleotide sequence which comprises the guide sequence, the direct repeat sequence, and wherein component (II) may comprise a second regulatory element operably linked to a polynucleotide sequence encoding the CRISPR enzyme. In such a system, where applicable the guide RNA may comprise a chimeric RNA.

[1343] In such a system, component (I) may comprise a first regulatory element operably linked to the guide sequence and the direct repeat sequence, and wherein component (II) may comprise a second regulatory element operably linked to a polynucleotide sequence encoding the CRISPR enzyme. Such a system may comprise more than one guide RNA, and each guide RNA has a different target whereby there is multiplexing. Components (a) and (b) may be on the same vector.

[1344] In any such systems comprising vectors, the one or more vectors may comprise one or more viral vectors, such as one or more retrovirus, lentivirus, adenovirus, adeno-associated virus or herpes simplex virus.

[1345] In any such systems comprising regulatory elements, at least one of said regulatory elements may comprise a tissue-specific promoter. The tissue-specific promoter may direct expression in a mammalian blood cell, in a mammalian liver cell or in a mammalian eye.

[1346] In any of the above-described compositions or systems the direct repeat sequence, may comprise one or more protein-interacting RNA aptamers. The one or more aptamers may be located in the tetraloop. The one or more aptamers may be capable of binding MS2 bacteriophage coat protein.

[1347] In any of the above-described compositions or systems the cell may be a eukaryotic cell or a prokaryotic cell; wherein the CRISPR complex is operable in the cell, and whereby the enzyme of the CRISPR complex has reduced capability of modifying one or more off-target loci of the cell as compared to an unmodified enzyme and/or whereby the enzyme in the CRISPR complex has increased capability of modifying the one or more target loci as compared to an unmodified enzyme.

[1348] The invention also provides a CRISPR complex of any of the above-described compositions or from any of the above-described systems.

[1349] The invention also provides a method of modifying a locus of interest in a cell comprising contacting the cell with any of the herein-described engineered CRISPR enzymes (e.g. engineered Cas effector module), compositions or any of the herein-described systems or vector systems, or wherein the cell comprises any of the herein-described CRISPR complexes present within the cell. In such methods the cell may be a prokaryotic or eukaryotic cell, preferably a eukaryotic cell. In such methods, an organism may comprise the cell. In such methods the organism may not be a human or other animal.

[1350] In certain embodiment, the invention also provides a non-naturally-occurring, engineered composition (e.g., engineered Cas9, Cpf1, C2c2, C2c1, Group 29/30, 13b, or any Cas protein which can fit into an AAV vector). Reference is made to FIGS. 19A, 19B, 19C, 19D, and 20A-F in U.S. Pat. No. 8,697,359 herein incorporated by reference to provide a list and guidance for other proteins which may also be used.

[1351] Any such method may be ex vivo or in vitro.

[1352] Effector Protein Acting as Nuclease

[1353] In some embodiments, the unmodified nucleic acid-targeting effector protein may have cleavage activity. In some embodiments, the RNA-targeting effector protein may direct cleavage of one or both nucleic acid (DNA or RNA) strands at the location of or near a target sequence, such as within the target sequence and/or within the complement of the target sequence or at sequences associated with the target sequence. In some embodiments, the nucleic acid-targeting effector protein may direct cleavage of one or both DNA or RNA strands within about 1, 2, 3, 4, 5, 6, 7, 8, 9, 10, 15, 20, 25, 50, 100, 200, 500, or more base pairs from the first or last nucleotide of a target sequence. In some embodiments, the cleavage may be staggered, i.e. generating sticky ends. In some embodiments, the cleavage is a staggered cut with a 5′ overhang. In some embodiments, the cleavage is a staggered cut with a 5′ overhang of 1 to 5 nucleotides, preferably of 4 or 5 nucleotides. In some embodiments, the cleavage site is distant from the PAM, e.g., the cleavage occurs after the 18th nucleotide on the non-target strand and after the 23rd nucleotide on the targeted strand. In some embodiments, the cleavage site occurs after the 18th nucleotide (counted from the PAM) on the non-target strand and after the 23rd nucleotide (counted from the PAM) on the targeted strand. In some embodiments, a vector encodes a nucleic acid-targeting effector protein that may be mutated with respect to a corresponding wild-type enzyme such that the mutated nucleic acid-targeting effector protein lacks the ability to cleave one or both DNA or RNA strands of a target polynucleotide containing a target sequence.

[1354] The methods according to the invention as described herein comprehend inducing one or more mutations in a eukaryotic cell (in vitro, i.e. in an isolated eukaryotic cell) as herein discussed comprising delivering to cell a vector as herein discussed. The mutation(s) can include the introduction, deletion, or substitution of one or more nucleotides at each target sequence of cell(s) via the guide(s) RNA(s) or sgRNA(s). The mutations can include the introduction, deletion, or substitution of 1-75 nucleotides at each target sequence of said cell(s) via the guide(s) RNA(s) or sgRNA(s). The mutations can include the introduction, deletion, or substitution of 1, 5, 10, 11, 12, 13, 14, 15, 16, 17, 18, 19, 20, 21, 22, 23, 24, 25, 26, 27, 28, 29, 30, 35, 40, 45, 50, or 75 nucleotides at each target sequence of said cell(s) via the guide(s) RNA(s) or sgRNA(s). The mutations can include the introduction, deletion, or substitution of 5, 10, 11, 12, 13, 14, 15, 16, 17, 18, 19, 20, 21, 22, 23, 24, 25, 26, 27, 28, 29, 30, 35, 40, 45, 50, or 75 nucleotides at each target sequence of said cell(s) via the guide(s) RNA(s) or sgRNA(s). The mutations include the introduction, deletion, or substitution of 10, 11, 12, 13, 14, 15, 16, 17, 18, 19, 20, 21, 22, 23, 24, 25, 26, 27, 28, 29, 30, 35, 40, 45, 50, or 75 nucleotides at each target sequence of said cell(s) via the guide(s) RNA(s) or sgRNA(s). The mutations can include the introduction, deletion, or substitution of 20, 21, 22, 23, 24, 25, 26, 27, 28, 29, 30, 35, 40, 45, 50, or 75 nucleotides at each target sequence of said cell(s) via the guide(s) RNA(s) or sgRNA(s). The mutations can include the introduction, deletion, or substitution of 40, 45, 50, 75, 100, 200, 300, 400 or 500 nucleotides at each target sequence of said cell(s) via the guide(s) RNA(s) or sgRNA(s).

### Applications

### Applications in Non-Human Organisms/Animals

[1355] In an aspect, the invention provides a non-human eukaryotic organism; preferably a multicellular eukaryotic organism, comprising a eukaryotic host cell according to any of the described embodiments. In other aspects, the invention provides a eukaryotic organism; preferably a multicellular eukaryotic organism, comprising a eukaryotic host cell according to any of the described embodiments. The organism in some embodiments of these aspects may be an animal; for example a mammal. Also, the organism may be an arthropod such as an insect. The present invention may also be extended to other agricultural applications such as, for example, farm and production animals. For example, pigs have many features that make them attractive as biomedical models, especially in regenerative medicine. In particular, pigs with severe combined immunodeficiency (SCID) may provide useful models for regenerative medicine, xenotransplantation (discussed also elsewhere herein), and tumor development and will aid in developing therapies for human SCID patients. Lee et al., (Proc Natl Acad Sci USA. 2014 May 20; 111(20):7260-5) utilized a reporter-guided transcription activator-like effector nuclease (TALEN) system to generated targeted modifications of recombination activating gene (RAG) 2 in somatic cells at high efficiency, including some that affected both alleles. The Cas effector protein may be applied to a similar system.

[1356] The methods of Lee et al., (Proc Natl Acad Sci USA. 2014 May 20; 111(20):7260-5) may be applied to the present invention analogously as follows. Mutated pigs are produced by targeted modification of RAG2 in fetal fibroblast cells followed by SCNT and embryo transfer. Constructs coding for CRISPR Cas and a reporter are electroporated into fetal-derived fibroblast cells. After 48 h, transfected cells expressing the green fluorescent protein are sorted into individual wells of a 96-well plate at an estimated dilution of a single cell per well. Targeted modification of RAG2 are screened by amplifying a genomic DNA fragment flanking any CRISPR Cas cutting sites followed by sequencing the PCR products. After screening and ensuring lack of off-site mutations, cells carrying targeted modification of RAG2 are used for SCNT. The polar body, along with a portion of the adjacent cytoplasm of oocyte, presumably containing the metaphase II plate, are removed, and a donor cell are placed in the perivitelline. The reconstructed embryos are then electrically porated to fuse the donor cell with the oocyte and then chemically activated. The activated embryos are incubated in Porcine Zygote Medium 3 (PZM3) with 0.5 μM Scriptaid (S7817; Sigma-Aldrich) for 14-16 h. Embryos are then washed to remove the Scriptaid and cultured in PZM3 until they were transferred into the oviducts of surrogate pigs.

[1357] The present invention is also applicable to modifying SNPs of other animals, such as cows. Tan et al. (Proc Natl Acad Sci USA. 2013 Oct. 8; 110(41): 16526-16531) expanded the livestock gene editing toolbox to include transcription activator-like (TAL) effector nuclease (TALEN)- and clustered regularly interspaced short palindromic repeats (CRISPR)/Cas9-stimulated homology-directed repair (HDR) using plasmid, rAAV, and oligonucleotide templates. Gene specific gRNA sequences were cloned into the Church lab gRNA vector (Addgene ID: 41824) according to their methods (Mali P, et al. (2013) RNA-Guided Human Genome Engineering via Cas9. Science 339(6121):823-826). The Cas9 nuclease was provided either by co-transfection of the hCas9 plasmid (Addgene ID: 41815) or mRNA synthesized from RCIScript-hCas9. This RCIScript-hCas9 was constructed by sub-cloning the XbaI-AgeI fragment from the hCas9 plasmid (encompassing the hCas9 cDNA) into the RCIScript plasmid. Heo et al. (Stem Cells Dev. 2015 Feb. 1; 24(3):393-402. doi: 10.1089/scd.2014.0278. Epub 2014 Nov. 3) reported highly efficient gene targeting in the bovine genome using bovine pluripotent cells and clustered regularly interspaced short palindromic repeat (CRISPR)/Cas9 nuclease. First, Heo et al. generate induced pluripotent stem cells (iPSCs) from bovine somatic fibroblasts by the ectopic expression of yamanaka factors and GSK3β and MEK inhibitor (2i) treatment. Heo et al. observed that these bovine iPSCs are highly similar to naïve pluripotent stem cells with regard to gene expression and developmental potential in teratomas. Moreover, CRISPR-Cas9 nuclease, which was specific for the bovine NANOG locus, showed highly efficient editing of the bovine genome in bovine iPSCs and embryos.

[1358] Igenity® provides a profile analysis of animals, such as cows, to perform and transmit traits of economic traits of economic importance, such as carcass composition, carcass quality, maternal and reproductive traits and average daily gain. The analysis of a comprehensive Igenity® profile begins with the discovery of DNA markers (most often single nucleotide polymorphisms or SNPs). All the markers behind the Igenity® profile were discovered by independent scientists at research institutions, including universities, research organizations, and government entities such as USDA. Markers are then analyzed at Igenity® in validation populations. Igenity® uses multiple resource populations that represent various production environments and biological types, often working with industry partners from the seedstock, cow-calf, feedlot and/or packing segments of the beef industry to collect phenotypes that are not commonly available. Cattle genome databases are widely available, see, e.g., the NAGRP Cattle Genome Coordination Program (www.animalgenome.org/cattle/maps/db.html). Thus, the present invention maybe applied to target bovine SNPs. One of skill in the art may utilize the above protocols for targeting SNPs and apply them to bovine SNPs as described, for example, by Tan et al. or Heo et al.

[1359] Qingjian Zou et al. (Journal of Molecular Cell Biology Advance Access published Oct. 12, 2015) demonstrated increased muscle mass in dogs by targeting targeting the first exon of the dog Myostatin (MSTN) gene (a negative regulator of skeletal muscle mass). First, the efficiency of the sgRNA was validated, using cotransfection of the sgRNA targeting MSTN with a Cas9 vector into canine embryonic fibroblasts (CEFs). Thereafter, MSTN KO dogs were generated by micro-injecting embryos with normal morphology with a mixture of Cas9 mRNA and MSTN sgRNA and auto-transplantation of the zygotes into the oviduct of the same female dog. The knock-out puppies displayed an obvious muscular phenotype on thighs compared with its wild-type littermate sister. This can also be performed using the Cas CRISPR systems provided herein.

### Livestock—Pigs

[1360] Viral targets in livestock may include, in some embodiments, porcine CD163, for example on porcine macrophages. CD163 is associated with infection (thought to be through viral cell entry) by PRRSv (Porcine Reproductive and Respiratory Syndrome virus, an arterivirus). Infection by PRRSv, especially of porcine alveolar macrophages (found in the lung), results in a previously incurable porcine syndrome (“Mystery swine disease” or “blue ear disease”) that causes suffering, including reproductive failure, weight loss and high mortality rates in domestic pigs. Opportunistic infections, such as enzootic pneumonia, meningitis and ear oedema, are often seen due to immune deficiency through loss of macrophage activity. It also has significant economic and environmental repercussions due to increased antibiotic use and financial loss (an estimated $660m per year).

[1361] As reported by Kristin M Whitworth and Dr Randall Prather et al. (Nature Biotech 3434 published online 7 Dec. 2015) at the University of Missouri and in collaboration with Genus Plc, CD163 was targeted using CRISPR-Cas9 and the offspring of edited pigs were resistant when exposed to PRRSv. One founder male and one founder female, both of whom had mutations in exon 7 of CD163, were bred to produce offspring. The founder male possessed an 11-bp deletion in exon 7 on one allele, which results in a frameshift mutation and missense translation at amino acid 45 in domain 5 and a subsequent premature stop codon at amino acid 64. The other allele had a 2-bp addition in exon 7 and a 377-bp deletion in the preceding intron, which were predicted to result in the expression of the first 49 amino acids of domain 5, followed by a premature stop code at amino acid 85. The sow had a 7 bp addition in one allele that when translated was predicted to express the first 48 amino acids of domain 5, followed by a premature stop codon at amino acid 70. The sow's other allele was unamplifiable. Selected offspring were predicted to be a null animal (CD163−/−), i.e. a CD163 knock out.

[1362] Accordingly, in some embodiments, porcine alveolar macrophages may be targeted by the CRISPR protein. In some embodiments, porcine CD163 may be targeted by the CRISPR protein. In some embodiments, porcine CD163 may be knocked out through induction of a DSB or through insertions or deletions, for example targeting deletion or modification of exon 7, including one or more of those described above, or in other regions of the gene, for example deletion or modification of exon 5.

[1363] An edited pig and its progeny are also envisaged, for example a CD163 knock out pig. This may be for livestock, breeding or modelling purposes (i.e. a porcine model). Semen comprising the gene knock out is also provided.

[1364] CD163 is a member of the scavenger receptor cysteine-rich (SRCR) superfamily. Based on in vitro studies SRCR domain 5 of the protein is the domain responsible for unpackaging and release of the viral genome. As such, other members of the SRCR superfamily may also be targeted in order to assess resistance to other viruses. PRRSV is also a member of the mammalian arterivirus group, which also includes murine lactate dehydrogenase-elevating virus, simian hemorrhagic fever virus and equine arteritis virus. The arteriviruses share important pathogenesis properties, including macrophage tropism and the capacity to cause both severe disease and persistent infection. Accordingly, arteriviruses, and in particular murine lactate dehydrogenase-elevating virus, simian hemorrhagic fever virus and equine arteritis virus, may be targeted, for example through porcine CD163 or homologues thereof in other species, and murine, simian and equine models and knockout also provided.

[1365] Indeed, this approach may be extended to viruses or bacteria that cause other livestock diseases that may be transmitted to humans, such as Swine Influenza Virus (SIV) strains which include influenza C and the subtypes of influenza A known as H1N1, H1N2, H2N1, H3N1, H3N2, and H2N3, as well as pneumonia, meningitis and oedema mentioned above.

### Treating Pathogens, Like Viral Pathogens Such as HIV

[1366] Cas-mediated genome editing might be used to introduce protective mutations in somatic tissues to combat nongenetic or complex diseases. For example, NHEJ-mediated inactivation of the CCR5 receptor in lymphocytes (Lombardo et al., Nat Biotechnol. 2007 November; 25(11): 1298-306) may be a viable strategy for circumventing HIV infection, whereas deletion of PCSK9 (Cohen et al., Nat Genet. 2005 February; 37(2):161-5) orangiopoietin (Musunuru et al., N Engl J Med. 2010 Dec. 2; 363(23):2220-7) may provide therapeutic effects against statin-resistant hypercholesterolemia or hyperlipidemia. Although these targets may be also addressed using siRNA-mediated protein knockdown, a unique advantage of NHEJ-mediated gene inactivation is the ability to achieve permanent therapeutic benefit without the need for continuing treatment. As with all gene therapies, it will of course be important to establish that each proposed therapeutic use has a favorable benefit-risk ratio.

[1367] Hydrodynamic delivery of plasmid DNA encoding Cas9 nd guide RNA along with a repair template into the liver of an adult mouse model of tyrosinemia was shown to be able to correct the mutant Fah gene and rescue expression of the wild-type Fah protein in ˜1 out of 250 cells (Nat Biotechnol. 2014 June; 32(6):551-3). In addition, clinical trials successfully used ZF nucleases to combat HIV infection by ex vivo knockout of the CCR5 receptor. In all patients, HIV DNA levels decreased, and in one out of four patients, HIV RNA became undetectable (Tebas et al., N Engl J Med. 2014 Mar. 6; 370(10):901-10). Both of these results demonstrate the promise of programmable nucleases as a new therapeutic platform.

[1368] In another embodiment, self-inactivating lentiviral vectors with an siRNA targeting a common exon shared by HIV tat/rev, a nucleolar-localizing TAR decoy, and an anti-CCR5-specific hammerhead ribozyme (see, e.g., DiGiusto et al. (2010) Sci Transl Med 2:36ra43) may be used/and or adapted to the CRISPR-Cas system of the present invention. A minimum of 2.5×106 CD34+ cells per kilogram patient weight may be collected and prestimulated for 16 to 20 hours in X-VIVO 15 medium (Lonza) containing 2 μmol/L-glutamine, stem cell factor (100 ng/ml), Flt-3 ligand (Flt-3L) (100 ng/ml), and thrombopoietin (10 ng/ml) (CellGenix) at a density of 2×106 cells/ml. Prestimulated cells may be transduced with lentiviral at a multiplicity of infection of 5 for 16 to 24 hours in 75-cm2 tissue culture flasks coated with fibronectin (25 mg/cm2) (RetroNectin, Takara Bio Inc.).

[1369] With the knowledge in the art and the teachings in this disclosure the skilled person can correct HSCs as to immunodeficiency condition such as HIV/AIDS comprising contacting an HSC with a CRISPR-Cas system that targets and knocks out CCR5. An guide RNA (and advantageously a dual guide approach, e.g., a pair of different guide RNAs; for instance, guide RNAs targeting of two clinically relevant genes, B2M and CCR5, in primary human CD4+ T cells and CD34+ hematopoietic stem and progenitor cells (HSPCs)) that targets and knocks out CCR5-and-Cas protein containing particle is contacted with HSCs. The so contacted cells can be administered; and optionally treated/expanded; cf. Cartier. See also Kiem, “Hematopoietic stem cell-based gene therapy for HIV disease,” Cell Stem Cell. Feb. 3, 2012; 10(2): 137-147; incorporated herein by reference along with the documents it cites; Mandal et al, “Efficient Ablation of Genes in Human Hematopoietic Stem and Effector Cells using CRISPR/Cas9,” Cell Stem Cell, Volume 15, Issue 5, p 643-652, 6 Nov. 2014; incorporated herein by reference along with the documents it cites. Mention is also made of Ebina, “CRISPR/Cas9 system to suppress HIV-1 expression by editing HIV-1 integrated proviral DNA” SCIENTIFIC REPORTS|3: 2510|DOI: 10.1038/srep02510, incorporated herein by reference along with the documents it cites, as another means for combatting HIV/AIDS using a CRISPR-Cas system.

[1370] The rationale for genome editing for HIV treatment originates from the observation that individuals homozygous for loss of function mutations in CCR5, a cellular co-receptor for the virus, are highly resistant to infection and otherwise healthy, suggesting that mimicking this mutation with genome editing could be a safe and effective therapeutic strategy [Liu, R., et al. Cell 86, 367-377 (1996)]. This idea was clinically validated when an HIV infected patient was given an allogeneic bone marrow transplant from a donor homozygous for a loss of function CCR5 mutation, resulting in undetectable levels of HIV and restoration of normal CD4 T-cell counts [Hutter, G., et al. The New England journal of medicine 360, 692-698 (2009)]. Although bone marrow transplantation is not a realistic treatment strategy for most HIV patients, due to cost and potential graft vs. host disease, HIV therapies that convert a patient's own T-cells into CCR5 are desirable.

[1371] Early studies using ZFNs and NHEJ to knockout CCR5 in humanized mouse models of HIV showed that transplantation of CCR5 edited CD4 T cells improved viral load and CD4 T-cell counts [Perez, E. E., et al. Nature biotechnology 26, 808-816 (2008)]. Importantly, these models also showed that HIV infection resulted in selection for CCR5 null cells, suggesting that editing confers a fitness advantage and potentially allowing a small number of edited cells to create a therapeutic effect.

[1372] As a result of this and other promising preclinical studies, genome editing therapy that knocks out CCR5 in patient T cells has now been tested in humans [Holt, N., et al. Nature biotechnology 28, 839-847 (2010); Li, L., et al. Molecular therapy: the journal of the American Society of Gene Therapy 21, 1259-1269 (2013)]. In a recent phase I clinical trial, CD4+ T cells from patients with HIV were removed, edited with ZFNs designed to knockout the CCR5 gene, and autologously transplanted back into patients [Tebas, P., et al. The New England journal of medicine 370, 901-910 (2014)].

[1373] In another study (Mandal et al., Cell Stem Cell, Volume 15, Issue 5, p643-652, 6 Nov. 2014), CRISPR-Cas9 has targeted two clinical relevant genes, B2M and CCR5, in human CD4+ T cells and CD34+ hematopoietic stem and progenitor cells (HSPCs). Use of single RNA guides led to highly efficient mutagenesis in HSPCs but not in T cells. A dual guide approach improved gene deletion efficacy in both cell types. HSPCs that had undergone genome editing with CRISPR-Cas9 retained multilineage potential. Predicted on- and off-target mutations were examined via target capture sequencing in HSPCs and low levels of off-target mutagenesis were observed at only one site. These results demonstrate that CRISPR-Cas9 can efficiently ablate genes in HSPCs with minimal off-target mutagenesis, which have broad applicability for hematopoietic cell-based therapy.

[1374] Wang et al. (PLoS One. 2014 Dec. 26; 9(12):e115987. doi: 10.1371/journal.pone.0115987) silenced CCR5 via CRISPR associated protein 9 (Cas9) and single guided RNAs (guide RNAs) with lentiviral vectors expressing Cas9 and CCR5 guide RNAs. Wang et al. showed that a single round transduction of lentiviral vectors expressing Cas9 and CCR5 guide RNAs into HIV-1 susceptible human CD4+ cells yields high frequencies of CCR5 gene disruption. CCR5 gene-disrupted cells are not only resistant to R5-tropic HIV-1, including transmitted/founder (T/F) HIV-1 isolates, but also have selective advantage over CCR5 gene-undisrupted cells during R5-tropic HIV-1 infection. Genome mutations at potential off-target sites that are highly homologous to these CCR5 guide RNAs in stably transduced cells even at 84 days post transduction were not detected by a T7 endonuclease I assay.

[1375] Fine et al. (Sci Rep. 2015 Jul. 1; 5:10777. doi: 10.1038/srep10777) identified a two-cassette system expressing pieces of the S. pyogenes Cas9 (SpCas9) protein which splice together in cellula to form a functional protein capable of site-specific DNA cleavage. With specific CRISPR guide strands, Fine et al. demonstrated the efficacy of this system in cleaving the HBB and CCR5 genes in human HEK-293T cells as a single Cas9 and as a pair of Cas9 nickases. The trans-spliced SpCas9 (tsSpCas9) displayed ˜35% of the nuclease activity compared with the wild-type SpCas9 (wtSpCas9) at standard transfection doses, but had substantially decreased activity at lower dosing levels. The greatly reduced open reading frame length of the tsSpCas9 relative to wtSpCas9 potentially allows for more complex and longer genetic elements to be packaged into an AAV vector including tissue-specific promoters, multiplexed guide RNA expression, and effector domain fusions to SpCas9.

[1376] Li et al. (J Gen Virol. 2015 August; 96(8):2381-93. doi: 10.1099/vir.0.000139. Epub 2015 Apr. 8) demonstrated that CRISPR-Cas9 can efficiently mediate the editing of the CCR5 locus in cell lines, resulting in the knockout of CCR5 expression on the cell surface. Next-generation sequencing revealed that various mutations were introduced around the predicted cleavage site of CCR5. For each of the three most effective guide RNAs that were analyzed, no significant off-target effects were detected at the 15 top-scoring potential sites. By constructing chimeric Ad5F35 adenoviruses carrying CRISPR-Cas9 components, Li et al. efficiently transduced primary CD4+ T-lymphocytes and disrupted CCR5 expression, and the positively transduced cells were conferred with HIV-1 resistance.

[1377] One of skill in the art may utilize the above studies of, for example, Holt, N., et al. Nature biotechnology 28, 839-847 (2010), Li, L., et al. Molecular therapy: the journal of the American Society of Gene Therapy 21, 1259-1269 (2013), Mandal et al., Cell Stem Cell, Volume 15, Issue 5, p643-652, 6 Nov. 2014, Wang et al. (PLoS One. 2014 Dec. 26; 9(12):e115987. doi: 10.1371/journal.pone.0115987), Fine et al. (Sci Rep. 2015 Jul. 1; 5:10777. doi: 10.1038/srep10777) and Li et al. (J Gen Virol. 2015 August; 96(8):2381-93. doi: 10.1099/vir.0.000139. Epub 2015 Apr. 8) for targeting CCR5 with the CRISPR Cas system of the present invention.

### Treating Pathogens, Like Viral Pathogens, Such as HBV

[1378] The present invention may also be applied to treat hepatitis B virus (HBV). However, the CRISPR Cas system must be adapted to avoid the shortcomings of RNAi, such as the risk of oversatring endogenous small RNA pathways, by for example, optimizing dose and sequence (see, e.g., Grimm et al., Nature vol. 441, 26 May 2006). For example, low doses, such as about 1-10×1014 particles per human are contemplated. In another embodiment, the CRISPR Cas system directed against HBV may be administered in liposomes, such as a stable nucleic-acid-lipid particle (SNALP) (see, e.g., Morrissey et al., Nature Biotechnology, Vol. 23, No. 8, August 2005). Daily intravenous injections of about 1, 3 or 5 mg/kg/day of CRISPR Cas targeted to HBV RNA in a SNALP are contemplated. The daily treatment may be over about three days and then weekly for about five weeks. In another embodiment, the system of Chen et al. (Gene Therapy (2007) 14, 11-19) may be used/and or adapted for the CRISPR Cas system of the present invention. Chen et al. use a double-stranded adenoassociated virus 8-pseudotyped vector (dsAAV2/8) to deliver shRNA. A single administration of dsAAV2/8 vector (1×1012 vector genomes per mouse), carrying HBV-specific shRNA, effectively suppressed the steady level of HBV protein, mRNA and replicative DNA in liver of HBV transgenic mice, leading to up to 2-3 log 10 decrease in HBV load in the circulation. Significant HBV suppression sustained for at least 120 days after vector administration. The therapeutic effect of shRNA was target sequence dependent and did not involve activation of interferon. For the present invention, a CRISPR Cas system directed to HBV may be cloned into an AAV vector, such as a dsAAV2/8 vector and administered to a human, for example, at a dosage of about 1×1015 vector genomes to about 1×1016 vector genomes per human. In another embodiment, the method of Wooddell et al. (Molecular Therapy vol. 21 no. 5, 973-985 May 2013) may be used/and or adapted to the CRISPR Cas system of the present invention. Woodell et al. show that simple coinjection of a hepatocyte-targeted, N-acetylgalactosamine-conjugated melittin-like peptide (NAG-MLP) with a liver-tropic cholesterol-conjugated siRNA (chol-siRNA) targeting coagulation factor VII (F7) results in efficient F7 knockdown in mice and nonhuman primates without changes in clinical chemistry or induction of cytokines. Using transient and transgenic mouse models of HBV infection, Wooddell et al. show that a single coinjection of NAG-MLP with potent chol-siRNAs targeting conserved HBV sequences resulted in multilog repression of viral RNA, proteins, and viral DNA with long duration of effect. Intraveinous coinjections, for example, of about 6 mg/kg of NAG-MLP and 6 mg/kg of HBV specific CRISPR Cas may be envisioned for the present invention. In the alternative, about 3 mg/kg of NAG-MLP and 3 mg/kg of HBV specific CRISPR Cas may be delivered on day one, followed by administration of about about 2-3 mg/kg of NAG-MLP and 2-3 mg/kg of HBV specific CRISPR Cas two weeks later.

[1379] In some embodiments, the target sequence is an HBV sequence. In some embodiments, the target sequences is comprised in an episomal viral nucleic acid molecule which is not integrated into the genome of the organism to thereby manipulate the episomal viral nucleic acid molecule. In some embodiments, the episomal nucleic acid molecule is a double-stranded DNA polynucleotide molecule or is a covalently closed circular DNA (cccDNA). In some embodiments, the CRISPR complex is capable of reducing the amount of episomal viral nucleic acid molecule in a cell of the organism compared to the amount of episomal viral nucleic acid molecule in a cell of the organism in the absence of providing the complex, or is capable of manipulating the episomal viral nucleic acid molecule to promote degradation of the episomal nucleic acid molecule. In some embodiments, the target HBV sequence is integrated into the genome of the organism. In some embodiments, when formed within the cell, the CRISPR complex is capable of manipulating the integrated nucleic acid to promote excision of all or part of the target HBV nucleic acid from the genome of the organism. In some embodiments, said at least one target HBV nucleic acid is comprised in a double-stranded DNA polynucleotide cccDNA molecule and/or viral DNA integrated into the genome of the organism and wherein the CRISPR complex manipulates at least one target HBV nucleic acid to cleave viral cccDNA and/or integrated viral DNA. In some embodiments, said cleavage comprises one or more double-strand break(s) introduced into the viral cccDNA and/or integrated viral DNA, optionally at least two double-strand break(s). In some embodiments, said cleavage is via one or more single-strand break(s) introduced into the viral cccDNA and/or integrated viral DNA, optionally at least two single-strand break(s). In some embodiments, said one or more double-strand break(s) or said one or more single-strand break(s) leads to the formation of one or more insertion or deletion mutations (INDELs) in the viral cccDNA sequences and/or integrated viral DNA sequences.

[1380] Lin et al. (Mol Ther Nucleic Acids. 2014 Aug. 19; 3:e186. doi: 10.1038/mtna.2014.38) designed eight gRNAs against HBV of genotype A. With the HBV-specific gRNAs, the CRISPR-Cas9 system significantly reduced the production of HBV core and surface proteins in Huh-7 cells transfected with an HBV-expression vector. Among eight screened gRNAs, two effective ones were identified. One gRNA targeting the conserved HBV sequence acted against different genotypes. Using a hydrodynamics-HBV persistence mouse model, Lin et al. further demonstrated that this system could cleave the intrahepatic HBV genome-containing plasmid and facilitate its clearance in vivo, resulting in reduction of serum surface antigen levels. These data suggest that the CRISPR-Cas9 system could disrupt the HBV-expressing templates both in vitro and in vivo, indicating its potential in eradicating persistent HBV infection.

[1381] Dong et al. (Antiviral Res. 2015 June; 118:110-7. doi: 10.1016/j.antiviral.2015.03.015. Epub 2015 Apr. 3) used the CRISPR-Cas9 system to target the HBV genome and efficiently inhibit HBV infection. Dong et al. synthesized four single-guide RNAs (guide RNAs) targeting the conserved regions of HBV. The expression of these guide RNAS with Cas9 reduced the viral production in Huh7 cells as well as in HBV-replication cell HepG2.2.15. Dong et al. further demonstrated that CRISPR-Cas9 direct cleavage and cleavage-mediated mutagenesis occurred in HBV cccDNA of transfected cells. In the mouse model carrying HBV cccDNA, injection of guide RNA-Cas9 plasmids via rapid tail vein resulted in the low level of cccDNA and HBV protein.

[1382] Liu et al. (J Gen Virol. 2015 August; 96(8):2252-61. doi: 10.1099/vir.0.000159. Epub 2015 Apr. 22) designed eight guide RNAs (gRNAs) that targeted the conserved regions of different HBV genotypes, which could significantly inhibit HBV replication both in vitro and in vivo to investigate the possibility of using the CRISPR-Cas9 system to disrupt the HBV DNA templates. The HBV-specific gRNA/Cas system could inhibit the replication of HBV of different genotypes in cells, and the viral DNA was significantly reduced by a single gRNA/Cas system and cleared by a combination of different gRNA/Cas systems.

[1383] Wang et al. (World J Gastroenterol. 2015 Aug. 28; 21(32):9554-65. doi: 10.3748/wjg.v21.i32.9554) designed 15 gRNAs against HBV of genotypes A-D. Eleven combinations of two above gRNAs (dual-gRNAs) covering the regulatory region of HBV were chosen. The efficiency of each gRNA and 11 dual-gRNAs on the suppression of HBV (genotypes A-D) replication was examined by the measurement of HBV surface antigen (HBsAg) or e antigen (HBeAg) in the culture supernatant. The destruction of HBV-expressing vector was examined in HuH7 cells co-transfected with dual-gRNAs and HBV-expressing vector using polymerase chain reaction (PCR) and sequencing method, and the destruction of cccDNA was examined in HepAD38 cells using KCl precipitation, plasmid-safe ATP-dependent DNase (PSAD) digestion, rolling circle amplification and quantitative PCR combined method. The cytotoxicity of these gRNAs was assessed by a mitochondrial tetrazolium assay. All of gRNAs could significantly reduce HBsAg or HBeAg production in the culture supernatant, which was dependent on the region in which gRNA against. All of dual gRNAs could efficiently suppress HBsAg and/or HBeAg production for HBV of genotypes A-D, and the efficacy of dual gRNAs in suppressing HBsAg and/or HBeAg production was significantly increased when compared to the single gRNA used alone. Furthermore, by PCR direct sequencing we confirmed that these dual gRNAs could specifically destroy HBV expressing template by removing the fragment between the cleavage sites of the two used gRNAs. Most importantly, gRNA-5 and gRNA-12 combination not only could efficiently suppressing HBsAg and/or HBeAg production, but also destroy the cccDNA reservoirs in HepAD38 cells.

[1384] Karimova et al. (Sci Rep. 2015 Sep. 3; 5:13734. doi: 10.1038/srep13734) identified cross-genotype conserved HBV sequences in the S and X region of the HBV genome that were targeted for specific and effective cleavage by a Cas9 nickase. This approach disrupted not only episomal cccDNA and chromosomally integrated HBV target sites in reporter cell lines, but also HBV replication in chronically and de novo infected hepatoma cell lines.

[1385] One of skill in the art may utilize the above studies of, for example, Lin et al. (Mol Ther Nucleic Acids. 2014 Aug. 19; 3:e186. doi: 10.1038/mtna.2014.38), Dong et al. (Antiviral Res. 2015 June; 118:110-7. doi: 10.1016/j.antiviral.2015.03.015. Epub 2015 Apr. 3), Liu et al. (J Gen Virol. 2015 August; 96(8):2252-61. doi: 10.1099/vir.0.000159. Epub 2015 Apr. 22), Wang et al. (World J Gastroenterol. 2015 Aug. 28; 21(32):9554-65. doi: 10.3748/wjg.v21.i32.9554) and Karimova et al. (Sci Rep. 2015 Sep. 3; 5:13734. doi: 10.1038/srep13734) for targeting HBV with the CRISPR Cas system of the present invention.

[1386] Chronic hepatitis B virus (HBV) infection is prevalent, deadly, and seldom cured due to the persistence of viral episomal DNA (cccDNA) in infected cells. Ramanan et al. (Ramanan V, Shlomai A, Cox D B, Schwartz R E, Michailidis E, Bhatta A, Scott D A, Zhang F, Rice C M, Bhatia S N, Sci Rep. 2015 Jun. 2; 5:10833. doi: 10.1038/srep10833, published online 2 Jun. 2015.) showed that the CRISPR/Cas9 system can specifically target and cleave conserved regions in the HBV genome, resulting in robust suppression of viral gene expression and replication. Upon sustained expression of Cas9 and appropriately chosen guide RNAs, they demonstrated cleavage of cccDNA by Cas9 and a dramatic reduction in both cccDNA and other parameters of viral gene expression and replication. Thus, they showed that directly targeting viral episomal DNA is a novel therapeutic approach to control the virus and possibly cure patients. This is also described in WO2015089465 A1, in the name of The Broad Institute et al., the contents of which are hereby incorporated by reference

[1387] As such targeting viral episomal DNA in HBV is preferred in some embodiments.

[1388] The present invention may also be applied to treat pathogens, e.g. bacterial, fungal and parasitic pathogens. Most research efforts have focused on developing new antibiotics, which once developed, would nevertheless be subject to the same problems of drug resistance. The invention provides novel CRISPR-based alternatives which overcome those difficulties. Furthermore, unlike existing antibiotics, CRISPR-based treatments can be made pathogen specific, inducing bacterial cell death of a target pathogen while avoiding beneficial bacteria.

[1389] The present invention may also be applied to treat hepatitis C virus (HCV). The methods of Roelvinki et al. (Molecular Therapy vol. 20 no. 9, 1737-1749 September 2012) may be applied to the CRISPR Cas system. For example, an AAV vector such as AAV8 may be a contemplated vector and for example a dosage of about 1.25×1011 to 1.25×1013 vector genomes per kilogram body weight (vg/kg) may be contemplated. The present invention may also be applied to treat pathogens, e.g. bacterial, fungal and parasitic pathogens. Most research efforts have focused on developing new antibiotics, which once developed, would nevertheless be subject to the same problems of drug resistance. The invention provides novel CRISPR-based alternatives which overcome those difficulties. Furthermore, unlike existing antibiotics, CRISPR-based treatments can be made pathogen specific, inducing bacterial cell death of a target pathogen while avoiding beneficial bacteria.

[1390] Jiang et al. (“RNA-guided editing of bacterial genomes using CRISPR-Cas systems,” Nature Biotechnology vol. 31, p. 233-9, March 2013) used a CRISPR-Cas9 system to mutate or kill S. pneumoniae and E. coli. The work, which introduced precise mutations into the genomes, relied on dual-RNA:Cas9-directed cleavage at the targeted genomic site to kill unmutated cells and circumvented the need for selectable markers or counter-selection systems. CRISPR systems have be used to reverse antibiotic resistance and eliminate the transfer of resistance between strains. Bickard et al. showed that Cas9, reprogrammed to target virulence genes, kills virulent, but not avirulent, S. aureus. Reprogramming the nuclease to target antibiotic resistance genes destroyed staphylococcal plasmids that harbor antibiotic resistance genes and immunized against the spread of plasmid-borne resistance genes. (see, Bikard et al., “Exploiting CRISPR-Cas nucleases to produce sequence-specific antimicrobials,” Nature Biotechnology vol. 32, 1146-1150, doi:10.1038/nbt.3043, published online 5 Oct. 2014.) Bikard showed that CRISPR-Cas9 antimicrobials function in vivo to kill S. aureus in a mouse skin colonization model. Similarly, Yosef et al used a CRISPR system to target genes encoding enzymes that confer resistance to β-lactam antibiotics (see Yousef et al., “Temperate and lytic bacteriophages programmed to sensitize and kill antibiotic-resistant bacteria,” Proc. Natl. Acad. Sci. USA, vol. 112, p. 7267-7272, doi: 10.1073/pnas.1500107112 published online May 18, 2015).

[1391] CRISPR systems can be used to edit genomes of parasites that are resistant to other genetic approaches. For example, a CRISPR-Cas9 system was shown to introduce double-stranded breaks into the in the Plasmodium yoelii genome (see, Zhang et al., “Efficient Editing of Malaria Parasite Genome Using the CRISPR/Cas9 System,” mBio. vol. 5, e01414-14, July-August 2014). Ghorbal et al. (“Genome editing in the human malaria parasite Plasmodium falciparumusing the CRISPR-Cas9 system,” Nature Biotechnology, vol. 32, p. 819-821, doi: 10.1038/nbt.2925, published online Jun. 1, 2014) modified the sequences of two genes, orc1 and kelch13, which have putative roles in gene silencing and emerging resistance to artemisinin, respectively. Parasites that were altered at the appropriate sites were recovered with very high efficiency, despite there being no direct selection for the modification, indicating that neutral or even deleterious mutations can be generated using this system. CRISPR-Cas9 is also used to modify the genomes of other pathogenic parasites, including Toxoplasma gondii (see Shen et al., “Efficient gene disruption in diverse strains of Toxoplasma gondii using CRISPR/CAS9,” mBio vol. 5:e01114-14, 2014; and Sidik et al., “Efficient Genome Engineering of Toxoplasma gondii Using CRISPR/Cas9,” PLoS One vol. 9, e100450, doi: 10.1371/journal.pone.0100450, published online Jun. 27, 2014).

[1392] Vyas et al. (“A Candida albicans CRISPR system permits genetic engineering of essential genes and gene families,” Science Advances, vol. 1, e1500248, DOI: 10.1126/sciadv.1500248, Apr. 3, 2015) employed a CRISPR system to overcome long-standing obstacles to genetic engineering in C. albicans and efficiently mutate in a single experiment both copies of several different genes. In an organism where several mechanisms contribute to drug resistance, Vyas produced homozygous double mutants that no longer displayed the hyper-resistance to fluconazole or cycloheximide displayed by the parental clinical isolate Can90. Vyas also obtained homozygous loss-of-function mutations in essential genes of C. albicans by creating conditional alleles. Null alleles of DCR1, which is required for ribosomal RNA processing, are lethal at low temperature but viable at high temperature. Vyas used a repair template that introduced a nonsense mutation and isolated dcr1/dcr1 mutants that failed to grow at 16° C.

Treating Diseases with Genetic or Epigenetic Aspects

[1393] The CRISPR-Cas systems of the present invention can be used to correct genetic mutations that were previously attempted with limited success using TALEN and ZFN and have been identified as potential targets for Cas9 systems, including as in published applications of Editas Medicine describing methods to use Cas9 systems to target loci to therapeutically address diseases with gene therapy, including, WO 2015/048577 CRISPR-RELATED METHODS AND COMPOSITIONS of Gluckmann et al.; WO 2015/070083 CRISPR-RELATED METHODS AND COMPOSITIONS WITH GOVERNING gRNAS of Glucksmann et al.; In some embodiments, the treatment, prophylaxis or diagnosis of Primary Open Angle Glaucoma (POAG) is provided. The target is preferably the MYOC gene. This is described in WO2015153780, the disclosure of which is hereby incorporated by reference.

[1394] Mention is made of WO2015/134812 CRISPR/CAS-RELATED METHODS AND COMPOSITIONS FOR TREATING USHER SYNDROME AND RETINITIS PIGMENTOSA of Maeder et al. Through the teachings herein the invention comprehends methods and materials of these documents applied in conjunction with the teachings herein. In an aspect of ocular and auditory gene therapy, methods and compositions for treating Usher Syndrome and Retinis-Pigmentosa may be adapted to the CRISPR-Cas system of the present invention (see, e.g., WO 2015/134812). In an embodiment, the WO 2015/134812 involves a treatment or delaying the onset or progression of Usher Syndrome type IIA (USH2A, USH11A) and retinitis pigmentosa 39 (RP39) by gene editing, e.g., using CRISPR-Cas9 mediated methods to correct the guanine deletion at position 2299 in the USH2A gene (e.g., replace the deleted guanine residue at position 2299 in the USH2A gene). A similar effect can be achieved with Cas. In a related aspect, a mutation is targeted by cleaving with either one or more nuclease, one or more nickase, or a combination thereof, e.g., to induce HDR with a donor template that corrects the point mutation (e.g., the single nucleotide, e.g., guanine, deletion). The alteration or correction of the mutant USH2A gene can be mediated by any mechanism. Exemplary mechanisms that can be associated with the alteration (e.g., correction) of the mutant HSH2A gene include, but are not limited to, non-homologous end joining, microhomology-mediated end joining (MMEJ), homology-directed repair (e.g., endogenous donor template mediated), SDSA (synthesis dependent strand annealing), single-strand annealing or single strand invasion. In an embodiment, the method used for treating Usher Syndrome and Retinis-Pigmentosa can include acquiring knowledge of the mutation carried by the subject, e.g., by sequencing the appropriate portion of the USH2A gene.

[1395] Accordingly, in some embodiments, the treatment, prophylaxis or diagnosis of Retinitis Pigmentosa is provided. A number of different genes are known to be associated with or result in Retinitis Pigmentosa, such as RP1, RP2 and so forth. These genes are targeted in some embodiments and either knocked out or repaired through provision of suitable a template. In some embodiments, delivery is to the eye by injection.

[1396] One or more Retinitis Pigmentosa genes can, in some embodiments, be selected from: RP1 (Retinitis pigmentosa-1), RP2 (Retinitis pigmentosa-2), RPGR (Retinitis pigmentosa-3), PRPH2 (Retinitis pigmentosa-7), RP9 (Retinitis pigmentosa-9), IMPDH1 (Retinitis pigmentosa-10), PRPF31 (Retinitis pigmentosa-11), CRB1 (Retinitis pigmentosa-12, autosomal recessive), PRPF8 (Retinitis pigmentosa-13), TULP1 (Retinitis pigmentosa-14), CA4 (Retinitis pigmentosa-17), HPRPF3 (Retinitis pigmentosa-18), ABCA4 (Retinitis pigmentosa-19), EYS (Retinitis pigmentosa-25), CERKL (Retinitis pigmentosa-26), FSCN2 (Retinitis pigmentosa-30), TOPORS (Retinitis pigmentosa-31), SNRNP200 (Retinitis pigmentosa 33), SEMA4A (Retinitis pigmentosa-35), PRCD (Retinitis pigmentosa-36), NR2E3 (Retinitis pigmentosa-37), MERTK (Retinitis pigmentosa-38), USH2A (Retinitis pigmentosa-39), PROM1 (Retinitis pigmentosa-41), KLHL7 (Retinitis pigmentosa-42), CNGB1 (Retinitis pigmentosa-45), BEST1 (Retinitis pigmentosa-50), TTC8 (Retinitis pigmentosa 51), C2irf71 (Retinitis pigmentosa 54), ARL6 (Retinitis pigmentosa 55), ZNF513 (Retinitis pigmentosa 58), DHDDS (Retinitis pigmentosa 59), BEST1 (Retinitis pigmentosa, concentric), PRPH2 (Retinitis pigmentosa, digenic), LRAT (Retinitis pigmentosa, juvenile), SPATA7 (Retinitis pigmentosa, juvenile, autosomal recessive), CRX (Retinitis pigmentosa, late-onset dominant), and/or RPGR (Retinitis pigmentosa, X-linked, and sinorespiratory infections, with or without deafness).

[1397] In some embodiments, the Retinitis Pigmentosa gene is MERTK (Retinitis pigmentosa-38) or USH2A (Retinitis pigmentosa-39).

[1398] Mention is also made of WO 2015/138510 and through the teachings herein the invention (using a CRISPR-Cas9 system) comprehends providing a treatment or delaying the onset or progression of Leber's Congenital Amaurosis 10 (LCA 10). LCA 10 is caused by a mutation in the CEP290 gene, e.g., a c.2991+1655, adenine to guanine mutation in the CEP290 gene which gives rise to a cryptic splice site in intron 26. This is a mutation at nucleotide 1655 of intron 26 of CEP290, e.g., an A to G mutation. CEP290 is also known as: CT87; MKS4; POC3; rd16; BBS14; JBTS5; LCAJO; NPHP6; SLSN6; and 3H11Ag (see, e.g., WO 2015/138510). In an aspect of gene therapy, the invention involves introducing one or more breaks near the site of the LCA target position (e.g., c.2991+1655; A to G) in at least one allele of the CEP290 gene. Altering the LCA10 target position refers to (1) break-induced introduction of an indel (also referred to herein as NHEJ-mediated introduction of an indel) in close proximity to or including a LCA10 target position (e.g., c.2991+1655A to G), or (2) break-induced deletion (also referred to herein as NHEJ-mediated deletion) of genomic sequence including the mutation at a LCA10 target position (e.g., c.2991+1655A to G). Both approaches give rise to the loss or destruction of the cryptic splice site resulting from the mutation at the LCA 10 target position. Accordingly, the use of Cas in the treatment of LCA is specifically envisaged.

[1399] Researchers are contemplating whether gene therapies could be employed to treat a wide range of diseases. The CRISPR systems of the present invention based on Cas effector protein are envisioned for such therapeutic uses, including, but noted limited to further exemplified targeted areas and with delivery methods as below. Some examples of conditions or diseases that might be usefully treated using the present system are included in the examples of genes and references included herein and are currently associated with those conditions are also provided there. The genes and conditions exemplified are not exhaustive.

[1400] Treating Diseases of the Circulatory System

[1401] The present invention also contemplates delivering the CRISPR-Cas system, specifically the novel CRISPR effector protein systems described herein, to the blood or hematopoetic stem cells. The plasma exosomes of Wahlgren et al. (Nucleic Acids Research, 2012, Vol. 40, No. 17 e130) were previously described and may be utilized to deliver the CRISPR Cas system to the blood. The nucleic acid-targeting system of the present invention is also contemplated to treat hemoglobinopathies, such as thalassemias and sickle cell disease. See, e.g., International Patent Publication No. WO 2013/126794 for potential targets that may be targeted by the CRISPR Cas system of the present invention.

[1402] Drakopoulou, “Review Article, The Ongoing Challenge of Hematopoietic Stem Cell-Based Gene Therapy for β-Thalassemia,” Stem Cells International, Volume 2011, Article ID 987980, 10 pages, doi:10.4061/2011/987980, incorporated herein by reference along with the documents it cites, as if set out in full, discuss modifying HSCs using a lentivirus that delivers a gene for β-globin or γ-globin. In contrast to using lentivirus, with the knowledge in the art and the teachings in this disclosure, the skilled person can correct HSCs as to β-Thalassemia using a CRISPR-Cas system that targets and corrects the mutation (e.g., with a suitable HDR template that delivers a coding sequence for β-globin or γ-globin, advantageously non-sickling β-globin or γ-globin); specifically, the guide RNA can target mutation that give rise to β-Thalassemia, and the HDR can provide coding for proper expression of β-globin or γ-globin. An guide RNA that targets the mutation-and-Cas protein containing particle is contacted with HSCs carrying the mutation. The particle also can contain a suitable HDR template to correct the mutation for proper expression of β-globin or γ-globin; or the HSC can be contacted with a second particle or a vector that contains or delivers the HDR template. The so contacted cells can be administered; and optionally treated/expanded; cf. Cartier. In this regard mention is made of: Cavazzana, “Outcomes of Gene Therapy for β-Thalassemia Major via Transplantation of Autologous Hematopoietic Stem Cells Transduced Ex Vivo with a Lentiviral βA-T87Q-Globin Vector.” tif2014.org/abstractFiles/Jean%20Antoine%20Ribeil_Abstract.pdf; Cavazzana-Calvo, “Transfusion independence and HMGA2 activation after gene therapy of human β-thalassaemia”, Nature 467, 318-322 (16 Sep. 2010) doi:10.1038/nature09328; Nienhuis, “Development of Gene Therapy for Thalassemia, Cold Spring Harbor Perspectives in Medicine, doi: 10.1101/cshperspect.a011833 (2012), LentiGlobin BB305, a lentiviral vector containing an engineered 3-globin gene (βA-T87Q); and Xie et al., “Seamless gene correction of 3-thalassaemia mutations in patient-specific iPSCs using CRISPR/Cas9 and piggyback” Genome Research gr.173427.114 (2014) www.genome.org/cgi/doi/10.1101/gr. 173427.114 (Cold Spring Harbor Laboratory Press); that is the subject of Cavazzana work involving human 3-thalassaemia and the subject of the Xie work, are all incorporated herein by reference, together with all documents cited therein or associated therewith. In the instant invention, the HDR template can provide for the HSC to express an engineered β-globin gene (e.g., 3A-T87Q), or 3-globin as in Xie.

[1403] Xu et al. (Sci Rep. 2015 Jul. 9; 5:12065. doi: 10.1038/srep12065) have designed TALENs and CRISPR-Cas9 to directly target the intron2 mutation site IVS2-654 in the globin gene. Xu et al. observed different frequencies of double-strand breaks (DSBs) at IVS2-654 loci using TALENs and CRISPR-Cas9, and TALENs mediated a higher homologous gene targeting efficiency compared to CRISPR-Cas9 when combined with the piggyBac transposon donor. In addition, more obvious off-target events were observed for CRISPR-Cas9 compared to TALENs. Finally, TALENs-corrected iPSC clones were selected for erythroblast differentiation using the OP9 co-culture system and detected relatively higher transcription of HBB than the uncorrected cells.

[1404] Song et al. (Stem Cells Dev. 2015 May 1; 24(9):1053-65. doi: 10.1089/scd.2014.0347. Epub 2015 Feb. 5) used CRISPR/Cas9 to correct β-Thal iPSCs; gene-corrected cells exhibit normal karyotypes and full pluripotency as human embryonic stem cells (hESCs) showed no off-targeting effects. Then, Song et al. evaluated the differentiation efficiency of the gene-corrected β-Thal iPSCs. Song et al. found that during hematopoietic differentiation, gene-corrected β-Thal iPSCs showed an increased embryoid body ratio and various hematopoietic progenitor cell percentages. More importantly, the gene-corrected β-Thal iPSC lines restored HBB expression and reduced reactive oxygen species production compared with the uncorrected group. Song et al.'s study suggested that hematopoietic differentiation efficiency of β-Thal iPSCs was greatly improved once corrected by the CRISPR-Cas9 system. Similar methods may be performed utilizing the CRISPR-Cas systems described herein, e.g. systems comprising Cas effector proteins.

[1405] Sickle cell anemia is an autosomal recessive genetic disease in which red blood cells become sickle-shaped. It is caused by a single base substitution in the β-globin gene, which is located on the short arm of chromosome 11. As a result, valine is produced instead of glutamic acid causing the production of sickle hemoglobin (HbS). This results in the formation of a distorted shape of the erythrocytes. Due to this abnormal shape, small blood vessels can be blocked, causing serious damage to the bone, spleen and skin tissues. This may lead to episodes of pain, frequent infections, hand-foot syndrome or even multiple organ failure. The distorted erythrocytes are also more susceptible to hemolysis, which leads to serious anemia. As in the case of β-thalassaemia, sickle cell anemia can be corrected by modifying HSCs with the CRISPR-Cas system. The system allows the specific editing of the cell's genome by cutting its DNA and then letting it repair itself. The Cas protein is inserted and directed by a RNA guide to the mutated point and then it cuts the DNA at that point. Simultaneously, a healthy version of the sequence is inserted. This sequence is used by the cell's own repair system to fix the induced cut. In this way, the CRISPR-Cas allows the correction of the mutation in the previously obtained stem cells. With the knowledge in the art and the teachings in this disclosure, the skilled person can correct HSCs as to sickle cell anemia using a CRISPR-Cas system that targets and corrects the mutation (e.g., with a suitable HDR template that delivers a coding sequence for β-globin, advantageously non-sickling β-globin); specifically, the guide RNA can target mutation that give rise to sickle cell anemia, and the HDR can provide coding for proper expression of β-globin. An guide RNA that targets the mutation-and-Cas protein containing particle is contacted with HSCs carrying the mutation. The particle also can contain a suitable HDR template to correct the mutation for proper expression of β-globin; or the HSC can be contacted with a second particle or a vector that contains or delivers the HDR template. The so contacted cells can be administered; and optionally treated/expanded; cf. Cartier. The HDR template can provide for the HSC to express an engineered β-globin gene (e.g., βA-T87Q), or β-globin as in Xie.

[1406] Williams, “Broadening the Indications for Hematopoietic Stem Cell Genetic Therapies,” Cell Stem Cell 13:263-264 (2013), incorporated herein by reference along with the documents it cites, as if set out in full, report lentivirus-mediated gene transfer into HSC/P cells from patients with the lysosomal storage disease metachromatic leukodystrophy disease (MLD), a genetic disease caused by deficiency of arylsulfatase A (ARSA), resulting in nerve demyelination; and lentivirus-mediated gene transfer into HSCs of patients with Wiskott-Aldrich syndrome (WAS) (patients with defective WAS protein, an effector of the small GTPase CDC42 that regulates cytoskeletal function in blood cell lineages and thus suffer from immune deficiency with recurrent infections, autoimmune symptoms, and thrombocytopenia with abnormally small and dysfunctional platelets leading to excessive bleeding and an increased risk of leukemia and lymphoma). In contrast to using lentivirus, with the knowledge in the art and the teachings in this disclosure, the skilled person can correct HSCs as to MLD (deficiency of arylsulfatase A (ARSA)) using a CRISPR-Cas system that targets and corrects the mutation (deficiency of arylsulfatase A (ARSA)) (e.g., with a suitable HDR template that delivers a coding sequence for ARSA); specifically, the guide RNA can target mutation that gives rise to MLD (deficient ARSA), and the HDR can provide coding for proper expression of ARSA. An guide RNA that targets the mutation-and-Cas protein containing particle is contacted with HSCs carrying the mutation. The particle also can contain a suitable HDR template to correct the mutation for proper expression of ARSA; or the HSC can be contacted with a second particle or a vector that contains or delivers the HDR template. The so contacted cells can be administered; and optionally treated/expanded; cf. Cartier. In contrast to using lentivirus, with the knowledge in the art and the teachings in this disclosure, the skilled person can correct HSCs as to WAS using a CRISPR-Cas system that targets and corrects the mutation (deficiency of WAS protein) (e.g., with a suitable HDR template that delivers a coding sequence for WAS protein); specifically, the guide RNA can target mutation that gives rise to WAS (deficient WAS protein), and the HDR can provide coding for proper expression of WAS protein. An guide RNA that targets the mutation-and-Cas protein containing particle is contacted with HSCs carrying the mutation. The particle also can contain a suitable HDR template to correct the mutation for proper expression of WAS protein; or the HSC can be contacted with a second particle or a vector that contains or delivers the HDR template. The so contacted cells can be administered; and optionally treated/expanded; cf. Cartier.

[1407] Watts, “Hematopoietic Stem Cell Expansion and Gene Therapy” Cytotherapy 13(10):1164-1171. doi:10.3109/14653249.2011.620748 (2011), incorporated herein by reference along with the documents it cites, as if set out in full, discusses hematopoietic stem cell (HSC) gene therapy, e.g., virus-mediated HSC gene thereapy, as an highly attractive treatment option for many disorders including hematologic conditions, immunodeficiencies including HIV/AIDS, and other genetic disorders like lysosomal storage diseases, including SCID-X1, ADA-SCID, (3-thalassemia, X-linked CGD, Wiskott-Aldrich syndrome, Fanconi anemia, adrenoleukodystrophy (ALD), and metachromatic leukodystrophy (MLD).

[1408] US Patent Publication Nos. 20110225664, 20110091441, 20100229252, 20090271881 and 20090222937 assigned to Cellectis, relates to CREI variants, wherein at least one of the two I-CreI monomers has at least two substitutions, one in each of the two functional subdomains of the LAGLIDADG (SEQ ID NO: 218) core domain situated respectively from positions 26 to 40 and 44 to 77 of I-CreI, said variant being able to cleave a DNA target sequence from the human interleukin-2 receptor gamma chain (IL2RG) gene also named common cytokine receptor gamma chain gene or gamma C gene. The target sequences identified in US Patent Publication Nos. 20110225664, 20110091441, 20100229252, 20090271881 and 20090222937 may be utilized for the nucleic acid-targeting system of the present invention.

[1409] Severe Combined Immune Deficiency (SCID) results from a defect in lymphocytes T maturation, always associated with a functional defect in lymphocytes B (Cavazzana-Calvo et al., Annu. Rev. Med., 2005, 56, 585-602; Fischer et al., Immunol. Rev., 2005, 203, 98-109). Overall incidence is estimated to 1 in 75 000 births. Patients with untreated SCID are subject to multiple opportunist micro-organism infections, and do generally not live beyond one year. SCID can be treated by allogenic hematopoietic stem cell transfer, from a familial donor. Histocompatibility with the donor can vary widely. In the case of Adenosine Deaminase (ADA) deficiency, one of the SCID forms, patients can be treated by injection of recombinant Adenosine Deaminase enzyme.

[1410] Since the ADA gene has been shown to be mutated in SCID patients (Giblett et al., Lancet, 1972, 2, 1067-1069), several other genes involved in SCID have been identified (Cavazzana-Calvo et al., Annu. Rev. Med., 2005, 56, 585-602; Fischer et al., Immunol. Rev., 2005, 203, 98-109). There are four major causes for SCID: (i) the most frequent form of SCID, SCID-X1 (X-linked SCID or X-SCID), is caused by mutation in the IL2RG gene, resulting in the absence of mature T lymphocytes and NK cells. IL2RG encodes the gamma C protein (Noguchi, et al., Cell, 1993, 73, 147-157), a common component of at least five interleukin receptor complexes. These receptors activate several targets through the JAK3 kinase (Macchi et al., Nature, 1995, 377, 65-68), which inactivation results in the same syndrome as gamma C inactivation; (ii) mutation in the ADA gene results in a defect in purine metabolism that is lethal for lymphocyte precursors, which in turn results in the quasi absence of B, T and NK cells; (iii) V(D)J recombination is an essential step in the maturation of immunoglobulins and T lymphocytes receptors (TCRs). Mutations in Recombination Activating Gene 1 and 2 (RAG1 and RAG2) and Artemis, three genes involved in this process, result in the absence of mature T and B lymphocytes; and (iv) Mutations in other genes such as CD45, involved in T cell specific signaling have also been reported, although they represent a minority of cases (Cavazzana-Calvo et al., Annu. Rev. Med., 2005, 56, 585-602; Fischer et al., Immunol. Rev., 2005, 203, 98-109). Since when their genetic bases have been identified, the different SCID forms have become a paradigm for gene therapy approaches (Fischer et al., Immunol. Rev., 2005, 203, 98-109) for two major reasons. First, as in all blood diseases, an ex vivo treatment can be envisioned. Hematopoietic Stem Cells (HSCs) can be recovered from bone marrow, and keep their pluripotent properties for a few cell divisions. Therefore, they can be treated in vitro, and then reinjected into the patient, where they repopulate the bone marrow. Second, since the maturation of lymphocytes is impaired in SCID patients, corrected cells have a selective advantage. Therefore, a small number of corrected cells can restore a functional immune system. This hypothesis was validated several times by (i) the partial restoration of immune functions associated with the reversion of mutations in SCID patients (Hirschhorn et al., Nat. Genet., 1996, 13, 290-295; Stephan et al., N. Engl. J. Med., 1996, 335, 1563-1567; Bousso et al., Proc. Natl., Acad. Sci. USA, 2000, 97, 274-278; Wada et al., Proc. Natl. Acad. Sci. USA, 2001, 98, 8697-8702; Nishikomori et al., Blood, 2004, 103, 4565-4572), (ii) the correction of SCID-X1 deficiencies in vitro in hematopoietic cells (Candotti et al., Blood, 1996, 87, 3097-3102; Cavazzana-Calvo et al., Blood, 1996, Blood, 88, 3901-3909; Taylor et al., Blood, 1996, 87, 3103-3107; Hacein-Bey et al., Blood, 1998, 92, 4090-4097), (iii) the correction of SCID-X1 (Soudais et al., Blood, 2000, 95, 3071-3077; Tsai et al., Blood, 2002, 100, 72-79), JAK-3 (Bunting et al., Nat. Med., 1998, 4, 58-64; Bunting et al., Hum. Gene Ther., 2000, 11, 2353-2364) and RAG2 (Yates et al., Blood, 2002, 100, 3942-3949) deficiencies in vivo in animal models and (iv) by the result of gene therapy clinical trials (Cavazzana-Calvo et al., Science, 2000, 288, 669-672; Aiuti et al., Nat. Med., 2002; 8, 423-425; Gaspar et al., Lancet, 2004, 364, 2181-2187).

[1411] US Patent Publication No. 20110182867 assigned to the Children's Medical Center Corporation and the President and Fellows of Harvard College relates to methods and uses of modulating fetal hemoglobin expression (HbF) in a hematopoietic progenitor cells via inhibitors of BCL11A expression or activity, such as RNAi and antibodies. The targets disclosed in US Patent Publication No. 20110182867, such as BCL11A, may be targeted by the CRISPR Cas system of the present invention for modulating fetal hemoglobin expression. See also Bauer et al. (Science 11 Oct. 2013: Vol. 342 no. 6155 pp. 253-257) and Xu et al. (Science 18 Nov. 2011: Vol. 334 no. 6058 pp. 993-996) for additional BCL11A targets.

[1412] With the knowledge in the art and the teachings in this disclosure, the skilled person can correct HSCs as to a genetic hematologic disorder, e.g., β-Thalassemia, Hemophilia, or a genetic lysosomal storage disease.

[1413] HSC—Delivery to and Editing of Hematopoetic Stem Cells; and Particular Conditions.

[1414] The term “Hematopoetic Stem Cell” or “HSC” is meant to include broadly those cells considered to be an HSC, e.g., blood cells that give rise to all the other blood cells and are derived from mesoderm; located in the red bone marrow, which is contained in the core of most bones. HSCs of the invention include cells having a phenotype of hematopoeitic stem cells, identified by small size, lack of lineage (lin) markers, and markers that belong to the cluster of differentiation series, like: CD34, CD38, CD90, CD133, CD105, CD45, and also c-kit,—the receptor for stem cell factor. Hematopoietic stem cells are negative for the markers that are used for detection of lineage commitment, and are, thus, called Lin-; and, during their purification by FACS, a number of up to 14 different mature blood-lineage markers, e.g., CD13 & CD33 for myeloid, CD71 for erythroid, CD19 for B cells, CD61 for megakaryocytic, etc. for humans; and, B220 (murine CD45) for B cells, Mac-1 (CD11b/CD18) for monocytes, Gr-1 for Granulocytes, Ter119 for erythroid cells, Il7Ra, CD3, CD4, CD5, CD8 for T cells, etc. Mouse HSC markers: CD34lo/−, SCA-1+, Thy1.1+/lo, CD38+, C-kit+, lin−, and Human HSC markers: CD34+, CD59+, Thy1/CD90+, CD38lo/−, C-kit/CD117+, and lin−. HSCs are identified by markers. Hence in embodiments discussed herein, the HSCs can be CD34+ cells. HSCs can also be hematopoietic stem cells that are CD34−/CD38−. Stem cells that may lack c-kit on the cell surface that are considered in the art as HSCs are within the ambit of the invention, as well as CD133+ cells likewise considered HSCs in the art.

[1415] The CRISPR-Cas (eg Cpf1) system may be engineered to target genetic locus or loci in HSCs. Cas (eg Cpf1) protein, advantageously codon-optimized for a eukaryotic cell and especially a mammalian cell, e.g., a human cell, for instance, HSC, and sgRNA targeting a locus or loci in HSC, e.g., the gene EMX1, may be prepared. These may be delivered via particles. The particles may be formed by the Cas (eg Cpf1) protein and the gRNA being admixed. The gRNA and Cas (eg Cpf1) protein mixture may for example be admixed with a mixture comprising or consisting essentially of or consisting of surfactant, phospholipid, biodegradable polymer, lipoprotein and alcohol, whereby particles containing the gRNA and Cas (eg Cpf1) protein may be formed. The invention comprehends so making particles and particles from such a method as well as uses thereof.

[1416] More generally, particles may be formed using an efficient process. First, Cas (eg Cpf1) protein and gRNA targeting the gene EMX1 or the control gene LacZ may be mixed together at a suitable, e.g., 3:1 to 1:3 or 2:1 to 1:2 or 1:1 molar ratio, at a suitable temperature, e.g., 15-30C, e.g., 20-25C, e.g., room temperature, for a suitable time, e.g., 15-45, such as 30 minutes, advantageously in sterile, nuclease free buffer, e.g., 1×PBS. Separately, particle components such as or comprising: a surfactant, e.g., cationic lipid, e.g., 1,2-dioleoyl-3-trimethylammonium-propane (DOTAP); phospholipid, e.g., dimyristoylphosphatidylcholine (DMPC); biodegradable polymer, such as an ethylene-glycol polymer or PEG, and a lipoprotein, such as a low-density lipoprotein, e.g., cholesterol may be dissolved in an alcohol, advantageously a C1-6 alkyl alcohol, such as methanol, ethanol, isopropanol, e.g., 100% ethanol. The two solutions may be mixed together to form particles containing the Cas (eg Cpf1)-gRNA complexes. In certain embodiments the particle can contain an HDR template. That can be a particle co-administered with gRNA+Cas (eg Cpf1) protein-containing particle, or i.e., in addition to contacting an HSC with an gRNA+Cas (eg Cpf1) protein-containing particle, the HSC is contacted with a particle containing an HDR template; or the HSC is contacted with a particle containing all of the gRNA, Cas (eg Cpf1) and the HDR template. The HDR template can be administered by a separate vector, whereby in a first instance the particle penetrates an HSC cell and the separate vector also penetrates the cell, wherein the HSC genome is modified by the gRNA+Cas (eg Cpf1) and the HDR template is also present, whereby a genomic loci is modified by the HDR; for instance, this may result in correcting a mutation.

[1417] After the particles form, HSCs in 96 well plates may be transfected with 15 ug Cas (eg Cpf1) protein per well. Three days after transfection, HSCs may be harvested, and the number of insertions and deletions (indels) at the EMX1 locus may be quantified.

[1418] This illustrates how HSCs can be modified using CRISPR-Cas (eg Cpf1) targeting a genomic locus or loci of interest in the HSC. The HSCs that are to be modified can be in vivo, i.e., in an organism, for example a human or a non-human eukaryote, e.g., animal, such as fish, e.g., zebra fish, mammal, e.g., primate, e.g., ape, chimpanzee, macaque, rodent, e.g., mouse, rabbit, rat, canine or dog, livestock (cow/bovine, sheep/ovine, goat or pig), fowl or poultry, e.g., chicken. The HSCs that are to be modified can be in vitro, i.e., outside of such an organism. And, modified HSCs can be used ex vivo, i.e., one or more HSCs of such an organism can be obtained or isolated from the organism, optionally the HSC(s) can be expanded, the HSC(s) are modified by a composition comprising a CRISPR-Cas (eg Cpf1) that targets a genetic locus or loci in the HSC, e.g., by contacting the HSC(s) with the composition, for instance, wherein the composition comprises a particle containing the CRISPR enzyme and one or more gRNA that targets the genetic locus or loci in the HSC, such as a particle obtained or obtainable from admixing an gRNA and Cas (eg Cpf1) protein mixture with a mixture comprising or consisting essentially of or consisting of surfactant, phospholipid, biodegradable polymer, lipoprotein and alcohol (wherein one or more gRNA targets the genetic locus or loci in the HSC), optionally expanding the resultant modified HSCs and administering to the organism the resultant modified HSCs. In some instances the isolated or obtained HSCs can be from a first organism, such as an organism from a same species as a second organism, and the second organism can be the organism to which the the resultant modified HSCs are administered, e.g., the first organism can be a donor (such as a relative as in a parent or sibling) to the second organism. Modified HSCs can have genetic modifications to address or alleviate or reduce symptoms of a disease or condition state of an individual or subject or patient. Modified HSCs, e.g., in the instance of a first organism donor to a second organism, can have genetic modifications to have the HSCs have one or more proteins e.g. surface markers or proteins more like that of the second organism. Modified HSCs can have genetic modifications to simulate a a disease or condition state of an individual or subject or patient and would be re-administered to a non-human organism so as to prepare an animal model. Expansion of HSCs is within the ambit of the skilled person from this disclosure and knowledge in the art, see e.g., Lee, “Improved ex vivo expansion of adult hematopoietic stem cells by overcoming CUL4-mediated degradation of HOXB4.” Blood. 2013 May 16; 121(20):4082-9. doi: 10.1182/blood-2012-09-455204. Epub 2013 Mar. 21.

[1419] As indicated to improve activity, gRNA may be pre-complexed with the Cas (eg Cpf1) protein, before formulating the entire complex in a particle. Formulations may be made with a different molar ratio of different components known to promote delivery of nucleic acids into cells (e.g. 1,2-dioleoyl-3-trimethylammonium-propane (DOTAP), 1,2-ditetradecanoyl-sn-glycero-3-phosphocholine (DMPC), polyethylene glycol (PEG), and cholesterol) For example DOTAP:DMPC:PEG:Cholesterol Molar Ratios may be DOTAP 100, DMPC 0, PEG 0, Cholesterol 0; or DOTAP 90, DMPC 0, PEG 10, Cholesterol 0; or DOTAP 90, DMPC 0, PEG 5, Cholesterol 5. DOTAP 100, DMPC 0, PEG 0, Cholesterol 0. The invention accordingly comprehends admixing gRNA, Cas (eg Cpf1) protein and components that form a particle; as well as particles from such admixing.

[1420] In a preferred embodiment, particles containing the Cas (eg Cpf1)-gRNA complexes may be formed by mixing Cas (eg Cpf1) protein and one or more gRNAs together, preferably at a 1:1 molar ratio, enzyme: guide RNA. Separately, the different components known to promote delivery of nucleic acids (e.g. DOTAP, DMPC, PEG, and cholesterol) are dissolved, preferably in ethanol. The two solutions are mixed together to form particles containing the Cas (eg Cpf1)-gRNA complexes. After the particles are formed, Cas (eg Cpf1)-gRNA complexes may be transfected into cells (e.g. HSCs). Bar coding may be applied. The particles, the Cas-9 and/or the gRNA may be barcoded.

[1421] The invention in an embodiment comprehends a method of preparing an gRNA-and-Cas (eg Cpf1) protein containing particle comprising admixing an gRNA and Cas (eg Cpf1) protein mixture with a mixture comprising or consisting essentially of or consisting of surfactant, phospholipid, biodegradable polymer, lipoprotein and alcohol. An embodiment comprehends an gRNA-and-Cas (eg Cpf1) protein containing particle from the method. The invention in an embodiment comprehends use of the particle in a method of modifying a genomic locus of interest, or an organism or a non-human organism by manipulation of a target sequence in a genomic locus of interest, comprising contacting a cell containing the genomic locus of interest with the particle wherein the gRNA targets the genomic locus of interest; or a method of modifying a genomic locus of interest, or an organism or a non-human organism by manipulation of a target sequence in a genomic locus of interest, comprising contacting a cell containing the genomic locus of interest with the particle wherein the gRNA targets the genomic locus of interest. In these embodiments, the genomic locus of interest is advantageously a genomic locus in an HSC.

[1422] Considerations for Therapeutic Applications: A consideration in genome editing therapy is the choice of sequence-specific nuclease, such as a variant of a Cas nuclease. Each nuclease variant may possess its own unique set of strengths and weaknesses, many of which must be balanced in the context of treatment to maximize therapeutic benefit. Thus far, two therapeutic editing approaches with nucleases have shown significant promise: gene disruption and gene correction. Gene disruption involves stimulation of NHEJ to create targeted indels in genetic elements, often resulting in loss of function mutations that are beneficial to patients. In contrast, gene correction uses HDR to directly reverse a disease causing mutation, restoring function while preserving physiological regulation of the corrected element. HDR may also be used to insert a therapeutic transgene into a defined ‘safe harbor’ locus in the genome to recover missing gene function. For a specific editing therapy to be efficacious, a sufficiently high level of modification must be achieved in target cell populations to reverse disease symptoms. This therapeutic modification ‘threshold’ is determined by the fitness of edited cells following treatment and the amount of gene product necessary to reverse symptoms. With regard to fitness, editing creates three potential outcomes for treated cells relative to their unedited counterparts: increased, neutral, or decreased fitness. In the case of increased fitness, for example in the treatment of SCID-X1, modified hematopoietic progenitor cells selectively expand relative to their unedited counterparts. SCID-X1 is a disease caused by mutations in the IL2RG gene, the function of which is required for proper development of the hematopoietic lymphocyte lineage [Leonard, W. J., et al. Immunological reviews 138, 61-86 (1994); Kaushansky, K. & Williams, W. J. Williams hematology, (McGraw-Hill Medical, New York, 2010)]. In clinical trials with patients who received viral gene therapy for SCID-X1, and a rare example of a spontaneous correction of SCID-X1 mutation, corrected hematopoietic progenitor cells may be able to overcome this developmental block and expand relative to their diseased counterparts to mediate therapy [Bousso, P., et al. Proceedings of the National Academy of Sciences of the United States of America 97, 274-278 (2000); Hacein-Bey-Abina, S., et al. The New England journal of medicine 346, 1185-1193 (2002); Gaspar, H. B., et al. Lancet 364, 2181-2187 (2004)]. In this case, where edited cells possess a selective advantage, even low numbers of edited cells can be amplified through expansion, providing a therapeutic benefit to the patient. In contrast, editing for other hematopoietic diseases, like chronic granulomatous disorder (CGD), would induce no change in fitness for edited hematopoietic progenitor cells, increasing the therapeutic modification threshold. CGD is caused by mutations in genes encoding phagocytic oxidase proteins, which are normally used by neutrophils to generate reactive oxygen species that kill pathogens [Mukherjee, S. & Thrasher, A. J. Gene 525, 174-181 (2013)]. As dysfunction of these genes does not influence hematopoietic progenitor cell fitness or development, but only the ability of a mature hematopoietic cell type to fight infections, there would be likely no preferential expansion of edited cells in this disease. Indeed, no selective advantage for gene corrected cells in CGD has been observed in gene therapy trials, leading to difficulties with long-term cell engraftment [Malech, H. L., et al. Proceedings of the National Academy of Sciences of the United States of America 94, 12133-12138 (1997); Kang, H. J., et al. Molecular therapy: the journal of the American Society of Gene Therapy 19, 2092-2101 (2011)]. As such, significantly higher levels of editing would be required to treat diseases like CGD, where editing creates a neutral fitness advantage, relative to diseases where editing creates increased fitness for target cells. If editing imposes a fitness disadvantage, as would be the case for restoring function to a tumor suppressor gene in cancer cells, modified cells would be outcompeted by their diseased counterparts, causing the benefit of treatment to be low relative to editing rates. This latter class of diseases would be particularly difficult to treat with genome editing therapy.

[1423] In addition to cell fitness, the amount of gene product necessary to treat disease also influences the minimal level of therapeutic genome editing that must be achieved to reverse symptoms. Haemophilia B is one disease where a small change in gene product levels can result in significant changes in clinical outcomes. This disease is caused by mutations in the gene encoding factor IX, a protein normally secreted by the liver into the blood, where it functions as a component of the clotting cascade. Clinical severity of haemophilia B is related to the amount of factor IX activity. Whereas severe disease is associated with less than 1% of normal activity, milder forms of the diseases are associated with greater than 1% of factor IX activity [Kaushansky, K. & Williams, W. J. Williams hematology, (McGraw-Hill Medical, New York, 2010); Lofqvist, T., et al. Journal of internal medicine 241, 395-400 (1997)]. This suggests that editing therapies that can restore factor IX expression to even a small percentage of liver cells could have a large impact on clinical outcomes. A study using ZFNs to correct a mouse model of haemophilia B shortly after birth demonstrated that 3-7% correction was sufficient to reverse disease symptoms, providing preclinical evidence for this hypothesis [Li, H., et al. Nature 475, 217-221 (2011)].

[1424] Disorders where a small change in gene product levels can influence clinical outcomes and diseases where there is a fitness advantage for edited cells, are ideal targets for genome editing therapy, as the therapeutic modification threshold is low enough to permit a high chance of success given the current technology. Targeting these diseases has now resulted in successes with editing therapy at the preclinical level and a phase I clinical trial. Improvements in DSB repair pathway manipulation and nuclease delivery are needed to extend these promising results to diseases with a neutral fitness advantage for edited cells, or where larger amounts of gene product are needed for treatment. Table 18 below shows some examples of applications of genome editing to therapeutic models, and the references of the below Table and the documents cited in those references are hereby incorporated herein by reference as if set out in full.

TABLE 18

| | Nuclease | | |
|---|---|---|---|
| Disease | Platform | Therapeutic | |
| Type | Employed | Strategy | References |
| Hemophilia | ZFN | HDR-mediated | Li, H., et al. Nature |
| B | | insertion of | 475, 217- |
| | | correct gene sequence | 221 (2011) |
| SCID | ZFN | HDR-mediated | Genovese, P., et al. |
| | | insertion of | Nature 510, |
| | | correct gene sequence | 235-240 (2014) |
| Hereditary | CRISPR | HDR-mediated | Yin, H., et al. Nature |
| tyrosinemia | | correction | biotechnology 32, |
| | | of mutation in liver | 551-553 (2014) |

[1425] Addressing each of the conditions of the foregoing table, using the CRISPR-Cas (eg Cpf1) system to target by either HDR-mediated correction of mutation, or HDR-mediated insertion of correct gene sequence, advantageously via a delivery system as herein, e.g., a particle delivery system, is within the ambit of the skilled person from this disclosure and the knowledge in the art. Thus, an embodiment comprehends contacting a Hemophilia B, SCID (e.g., SCID-X1, ADA-SCID) or Hereditary tyrosinemia mutation-carrying HSC with an gRNA-and-Cas (eg Cpf1) protein containing particle targeting a genomic locus of interest as to Hemophilia B, SCID (e.g., SCID-X1, ADA-SCID) or Hereditary tyrosinemia (e.g., as in Li, Genovese or Yin). The particle also can contain a suitable HDR template to correct the mutation; or the HSC can be contacted with a second particle or a vector that contains or delivers the HDR template. In this regard, it is mentioned that Haemophilia B is an X-linked recessive disorder caused by loss-of-function mutations in the gene encoding Factor IX, a crucial component of the clotting cascade. Recovering Factor IX activity to above 1% of its levels in severely affected individuals can transform the disease into a significantly milder form, as infusion of recombinant Factor IX into such patients prophylactically from a young age to achieve such levels largely ameliorates clinical complications. With the knowledge in the art and the teachings in this disclosure, the skilled person can correct HSCs as to Haemophilia B using a CRISPR-Cas (eg Cpf1) system that targets and corrects the mutation (X-linked recessive disorder caused by loss-of-function mutations in the gene encoding Factor IX) (e.g., with a suitable HDR template that delivers a coding sequence for Factor IX); specifically, the gRNA can target mutation that give rise to Haemophilia B, and the HDR can provide coding for proper expression of Factor IX. An gRNA that targets the mutation-and-Cas (eg Cpf1) protein containing particle is contacted with HSCs carrying the mutation. The particle also can contain a suitable HDR template to correct the mutation for proper expression of Factor IX; or the HSC can be contacted with a second particle or a vector that contains or delivers the HDR template. The so contacted cells can be administered; and optionally treated/expanded; cf. Cartier, discussed herein.

[1426] In Cartier, “MINI-SYMPOSIUM: X-Linked Adrenoleukodystrophypa, Hematopoietic Stem Cell Transplantation and Hematopoietic Stem Cell Gene Therapy in X-Linked Adrenoleukodystrophy,” Brain Pathology 20 (2010) 857-862, incorporated herein by reference along with the documents it cites, as if set out in full, there is recognition that allogeneic hematopoietic stem cell transplantation (HSCT) was utilized to deliver normal lysosomal enzyme to the brain of a patient with Hurler's disease, and a discussion of HSC gene therapy to treat ALD. In two patients, peripheral CD34+ cells were collected after granulocyte-colony stimulating factor (G-CSF) mobilization and transduced with an myeloproliferative sarcoma virus enhancer, negative control region deleted, d1587rev primer binding site substituted (MND)-ALD lentiviral vector. CD34+ cells from the patients were transduced with the MND-ALD vector during 16 h in the presence of cytokines at low concentrations. Transduced CD34+ cells were frozen after transduction to perform on 5% of cells various safety tests that included in particular three replication-competent lentivirus (RCL) assays. Transduction efficacy of CD34+ cells ranged from 35% to 50% with a mean number of lentiviral integrated copy between 0.65 and 0.70. After the thawing of transduced CD34+ cells, the patients were reinfused with more than 4.106 transduced CD34+ cells/kg following full myeloablation with busulfan and cyclophos-phamide. The patient's HSCs were ablated to favor engraftment of the gene-corrected HSCs. Hematological recovery occurred between days 13 and 15 for the two patients. Nearly complete immunological recovery occurred at 12 months for the first patient, and at 9 months for the second patient. In contrast to using lentivirus, with the knowledge in the art and the teachings in this disclosure, the skilled person can correct HSCs as to ALD using a CRISPR-Cas system that targets and corrects the mutation (e.g., with a suitable HDR template); specifically, the gRNA can target mutations in ABCD1, a gene located on the X chromosome that codes for ALD, a peroxisomal membrane transporter protein, and the HDR can provide coding for proper expression of the protein. An gRNA that targets the mutation-and-Cas protein containing particle is contacted with HSCs, e.g., CD34+ cells carrying the mutation as in Cartier. The particle also can contain a suitable HDR template to correct the mutation for expression of the peroxisomal membrane transporter protein; or the HSC can be contacted with a second particle or a vector that contains or delivers the HDR template. The so contacted cells optionally can be treated as in Cartier. The so contacted cells can be administered as in Cartier.

[1427] Mention is made of WO 2015/148860, through the teachings herein the invention comprehends methods and materials of these documents applied in conjunction with the teachings herein. In an aspect of blood-related disease gene therapy, methods and compositions for treating beta thalassemia may be adapted to the CRISPR-Cas system of the present invention (see, e.g., WO 2015/148860). In an embodiment, WO 2015/148860 involves the treatment or prevention of beta thalassemia, or its symptoms, e.g., by altering the gene for B-cell CLL/lymphoma 11A (BCL11A). The BCL11A gene is also known as B-cell CLL/lymphoma 11A, BCL11A-L, BCL11A-S, BCL11AXL, CTIP 1, HBFQTL5 and ZNF. BCL11A encodes a zinc-finger protein that is involved in the regulation of globin gene expression. By altering the BCL11A gene (e.g., one or both alleles of the BCL11A gene), the levels of gamma globin can be increased. Gamma globin can replace beta globin in the hemoglobin complex and effectively carry oxygen to tissues, thereby ameliorating beta thalassemia disease phenotypes.

[1428] Mention is also made of WO 2015/148863 and through the teachings herein the invention comprehends methods and materials of these documents which may be adapted to the CRISPR-Cas system of the present invention. In an aspect of treating and preventing sickle cell disease, which is an inherited hematologic disease, WO 2015/148863 comprehends altering the BCL11A gene. By altering the BCL11A gene (e.g., one or both alleles of the BCL11A gene), the levels of gamma globin can be increased. Gamma globin can replace beta globin in the hemoglobin complex and effectively carry oxygen to tissues, thereby ameliorating sickle cell disease phenotypes.

[1429] In an aspect of the invention, methods and compositions which involve editing a target nucleic acid sequence, or modulating expression of a target nucleic acid sequence, and applications thereof in connection with cancer immunotherapy are comprehended by adapting the CRISPR-Cas system of the present invention. Reference is made to the application of gene therapy in WO 2015/161276 which involves methods and compositions which can be used to affect T-cell proliferation, survival and/or function by altering one or more T-cell expressed genes, e.g., one or more of FAS, BID, CTLA4, PDCD1, CBLB, PTPN6, TRAC and/or TRBC genes. In a related aspect, T-cell proliferation can be affected by altering one or more T-cell expressed genes, e.g., the CBLB and/or PTPN6 gene, FAS and/or BID gene, CTLA4 and/or PDCDI and/or TRAC and/or TRBC gene.

[1430] Chimeric antigen receptor (CAR)19 T-cells exhibit anti-leukemic effects in patient malignancies. However, leukemia patients often do not have enough T-cells to collect, meaning that treatment must involve modified T cells from donors. Accordingly, there is interest in establishing a bank of donor T-cells. Qasim et al. (“First Clinical Application of Talen Engineered Universal CAR19 T Cells in B-ALL” ASH 57th Annual Meeting and Exposition, Dec. 5-8, 2015, Abstract 2046 (ash.confex.com/ash/2015/webprogram/Paper81653.html published online November 2015) discusses modifying CAR19 T cells to eliminate the risk of graft-versus-host disease through the disruption of T-cell receptor expression and CD52 targeting. Furthermore, CD52 cells were targeted such that they became insensitive to Alemtuzumab, and thus allowed Alemtuzumab to prevent host-mediated rejection of human leukocyte antigen (HLA) mismatched CAR19 T-cells. Investigators used third generation self-inactivating lentiviral vector encoding a 4g7 CAR19 (CD19 scFv-4-1BB-CD3) linked to RQR8, then electroporated cells with two pairs of TALEN mRNA for multiplex targeting for both the T-cell receptor (TCR) alpha constant chain locus and the CD52 gene locus. Cells which were still expressing TCR following ex vivo expansion were depleted using CliniMacs α/β TCR depletion, yielding a T-cell product (UCART19) with <1% TCR expression, 85% of which expressed CAR19, and 64% becoming CD52 negative. The modified CAR19 T cells were administered to treat a patient's relapsed acute lymphoblastic leukemia. The teachings provided herein provide effective methods for providing modified hematopoietic stem cells and progeny thereof, including but not limited to cells of the myeloid and lymphoid lineages of blood, including T cells, B cells, monocytes, macrophages, neutrophils, basophils, eosinophils, erythrocytes, dendritic cells, and megakaryocytes or platelets, and natural killer cells and their precursors and progenitors. Such cells can be modified by knocking out, knocking in, or otherwise modulating targets, for example to remove or modulate CD52 as described above, and other targets, such as, without limitation, CXCR4, and PD-1. Thus compositions, cells, and method of the invention can be used to modulate immune responses and to treat, without limitation, malignancies, viral infections, and immune disorders, in conjunction with modification of administration of T cells or other cells to patients.

[1431] Mention is made of WO 2015/148670 and through the teachings herein the invention comprehends methods and materials of this document applied in conjunction with the teachings herein. In an aspect of gene therapy, methods and compositions for editing of a target sequence related to or in connection with Human Immunodeficiency Virus (HIV) and Acquired Immunodeficiency Syndrome (AIDS) are comprehended. In a related aspect, the invention described herein comprehends prevention and treatment of HIV infection and AIDS, by introducing one or more mutations in the gene for C-C chemokine receptor type 5 (CCR5). The CCR5 gene is also known as CKR5, CCR-5, CD195, CKR-5, CCCKR5, CMKBR5, IDDM22, and CC-CKR-5. In a further aspect, the invention described herein comprehends provide for prevention or reduction of HIV infection and/or prevention or reduction of the ability for HIV to enter host cells, e.g., in subjects who are already infected. Exemplary host cells for HIV include, but are not limited to, CD4 cells, T cells, gut associated lymphatic tissue (GALT), macrophages, dendritic cells, myeloid precursor cell, and microglia. Viral entry into the host cells requires interaction of the viral glycoproteins gp41 and gp120 with both the CD4 receptor and a co-receptor, e.g., CCR5. If a co-receptor, e.g., CCR5, is not present on the surface of the host cells, the virus cannot bind and enter the host cells. The progress of the disease is thus impeded. By knocking out or knocking down CCR5 in the host cells, e.g., by introducing a protective mutation (such as a CCR5 delta 32 mutation), entry of the HIV virus into the host cells is prevented.

[1432] X-linked Chronic granulomatous disease (CGD) is a hereditary disorder of host defense due to absent or decreased activity of phagocyte NADPH oxidase. Using a CRISPR-Cas system that targets and corrects the mutation (absent or decreased activity of phagocyte NADPH oxidase) (e.g., with a suitable HDR template that delivers a coding sequence for phagocyte NADPH oxidase); specifically, the gRNA can target mutation that gives rise to CGD (deficient phagocyte NADPH oxidase), and the HDR can provide coding for proper expression of phagocyte NADPH oxidase. An gRNA that targets the mutation-and-Cas protein containing particle is contacted with HSCs carrying the mutation. The particle also can contain a suitable HDR template to correct the mutation for proper expression of phagocyte NADPH oxidase; or the HSC can be contacted with a second particle or a vector that contains or delivers the HDR template. The so contacted cells can be administered; and optionally treated/expanded; cf. Cartier.

[1433] Fanconi anemia: Mutations in at least 15 genes (FANCA, FANCB, FANCC, FANCD1/BRCA2, FANCD2, FANCE, FANCF, FANCG, FANCI, FANCJ/BACH1/BRIP1, FANCL/PHF9/POG, FANCM, FANCN/PALB2, FANCO/Rad51C, and FANCP/SLX4/BTBD12) can cause Fanconi anemia. Proteins produced from these genes are involved in a cell process known as the FA pathway. The FA pathway is turned on (activated) when the process of making new copies of DNA, called DNA replication, is blocked due to DNA damage. The FA pathway sends certain proteins to the area of damage, which trigger DNA repair so DNA replication can continue. The FA pathway is particularly responsive to a certain type of DNA damage known as interstrand cross-links (ICLs). ICLs occur when two DNA building blocks (nucleotides) on opposite strands of DNA are abnormally attached or linked together, which stops the process of DNA replication. ICLs can be caused by a buildup of toxic substances produced in the body or by treatment with certain cancer therapy drugs. Eight proteins associated with Fanconi anemia group together to form a complex known as the FA core complex. The FA core complex activates two proteins, called FANCD2 and FANCI. The activation of these two proteins brings DNA repair proteins to the area of the ICL so the cross-link can be removed and DNA replication can continue. the FA core complex. More in particular, the FA core complex is a nuclear multiprotein complex consisting of FANCA, FANCB, FANCC, FANCE, FANCF, FANCG, FANCL, and FANCM, functions as an E3 ubiquitin ligase and mediates the activation of the ID complex, which is a heterodimer composed of FANCD2 and FANCI. Once monoubiquitinated, it interacts with classical tumor suppressors downstream of the FA pathway including FANCD1/BRCA2, FANCN/PALB2, FANCJ/BRIP1, and FANCO/Rad51C and thereby contributes to DNA repair via homologous recombination (HR). Eighty to 90 percent of FA cases are due to mutations in one of three genes, FANCA, FANCC, and FANCG. These genes provide instructions for producing components of the FA core complex. Mutations in such genes associated with the FA core complex will cause the complex to be nonfunctional and disrupt the entire FA pathway. As a result, DNA damage is not repaired efficiently and ICLs build up over time. Geiselhart, “Review Article, Disrupted Signaling through the Fanconi Anemia Pathway Leads to Dysfunctional Hematopoietic Stem Cell Biology: Underlying Mechanisms and Potential Therapeutic Strategies,” Anemia Volume 2012 (2012), Article ID 265790, dx.doi.org/10.1155/2012/265790 discussed FA and an animal experiment involving intrafemoral injection of a lentivirus encoding the FANCC gene resulting in correction of HSCs in vivo. Using a CRISPR-Cas system that targets and one or more of the mutations associated with FA, for instance a CRISPR-Cas system having gRNA(s) and HDR template(s) that respectively targets one or more of the mutations of FANCA, FANCC, or FANCG that give rise to FA and provide corrective expression of one or more of FANCA, FANCC or FANCG; e.g., the gRNA can target a mutation as to FANCC, and the HDR can provide coding for proper expression of FANCC. An gRNA that targets the mutation(s) (e.g., one or more involved in FA, such as mutation(s) as to any one or more of FANCA, FANCC or FANCG)-and-Cas protein containing particle is contacted with HSCs carrying the mutation(s). The particle also can contain a suitable HDR template(s) to correct the mutation for proper expression of one or more of the proteins involved in FA, such as any one or more of FANCA, FANCC or FANCG; or the HSC can be contacted with a second particle or a vector that contains or delivers the HDR template. The so contacted cells can be administered; and optionally treated/expanded; cf. Cartier.

[1434] The particle in the herein discussion (e.g., as to containing gRNA(s) and Cas, optionally HDR template(s), or HDR template(s); for instance as to Hemophilia B, SCID, SCID-X1, ADA-SCID, Hereditary tyrosinemia, β-thalassemia, X-linked CGD, Wiskott-Aldrich syndrome, Fanconi anemia, adrenoleukodystrophy (ALD), metachromatic leukodystrophy (MLD), HIV/AIDS, Immunodeficiency disorder, Hematologic condition, or genetic lysosomal storage disease) is advantageously obtained or obtainable from admixing an gRNA(s) and Cas protein mixture (optionally containing HDR template(s) or such mixture only containing HDR template(s) when separate particles as to template(s) is desired) with a mixture comprising or consisting essentially of or consisting of surfactant, phospholipid, biodegradable polymer, lipoprotein and alcohol (wherein one or more gRNA targets the genetic locus or loci in the HSC).

[1435] Indeed, the invention is especially suited for treating hematopoietic genetic disorders with genome editing, and immunodeficiency disorders, such as genetic immunodeficiency disorders, especially through using the particle technology herein-discussed. Genetic immunodeficiencies are diseases where genome editing interventions of the instant invention can successful. The reasons include: Hematopoietic cells, of which immune cells are a subset, are therapeutically accessible. They can be removed from the body and transplanted autologously or allogenically. Further, certain genetic immunodeficiencies, e.g., severe combined immunodeficiency (SCID), create a proliferative disadvantage for immune cells. Correction of genetic lesions causing SCID by rare, spontaneous ‘reverse’ mutations indicates that correcting even one lymphocyte progenitor may be sufficient to recover immune function in patients . . . / . . . / . . . /Users/t_kowalski/AppData/Local/Microsoft/Windows/Temporary Internet Files/Content.Outlook/GA8VY8LK/Treating SCID for Ellen.docx-_ENREF_1 See Bousso, P., et al. Diversity, functionality, and stability of the T cell repertoire derived in vivo from a single human T cell precursor. Proceedings of the National Academy of Sciences of the United States of America 97, 274-278 (2000). The selective advantage for edited cells allows for even low levels of editing to result in a therapeutic effect. This effect of the instant invention can be seen in SCID, Wiskott-Aldrich Syndrome, and the other conditions mentioned herein, including other genetic hematopoietic disorders such as alpha- and beta-thalassemia, where hemoglobin deficiencies negatively affect the fitness of erythroid progenitors.

[1436] The activity of NHEJ and HDR DSB repair varies significantly by cell type and cell state. NHEJ is not highly regulated by the cell cycle and is efficient across cell types, allowing for high levels of gene disruption in accessible target cell populations. In contrast, HDR acts primarily during S/G2 phase, and is therefore restricted to cells that are actively dividing, limiting treatments that require precise genome modifications to mitotic cells [Ciccia, A. & Elledge, S. J. Molecular cell 40, 179-204 (2010); Chapman, J. R., et al. Molecular cell 47, 497-510 (2012)].

[1437] The efficiency of correction via HDR may be controlled by the epigenetic state or sequence of the targeted locus, or the specific repair template configuration (single vs. double stranded, long vs. short homology arms) used [Hacein-Bey-Abina, S., et al. The New England journal of medicine 346, 1185-1193 (2002); Gaspar, H. B., et al. Lancet 364, 2181-2187 (2004); Beumer, K. J., et al. G3 (2013)]. The relative activity of NHEJ and HDR machineries in target cells may also affect gene correction efficiency, as these pathways may compete to resolve DSBs [Beumer, K. J., et al. Proceedings of the National Academy of Sciences of the United States of America 105, 19821-19826 (2008)]. HDR also imposes a delivery challenge not seen with NHEJ strategies, as it requires the concurrent delivery of nucleases and repair templates. In practice, these constraints have so far led to low levels of HDR in therapeutically relevant cell types. Clinical translation has therefore largely focused on NHEJ strategies to treat disease, although proof-of-concept preclinical HDR treatments have now been described for mouse models of haemophilia B and hereditary tyrosinemia [Li, H., et al. Nature 475, 217-221 (2011); Yin, H., et al. Nature biotechnology 32, 551-553 (2014)].

[1438] Any given genome editing application may comprise combinations of proteins, small RNA molecules, and/or repair templates, making delivery of these multiple parts substantially more challenging than small molecule therapeutics. Two main strategies for delivery of genome editing tools have been developed: ex vivo and in vivo. In ex vivo treatments, diseased cells are removed from the body, edited and then transplanted back into the patient. Ex vivo editing has the advantage of allowing the target cell population to be well defined and the specific dosage of therapeutic molecules delivered to cells to be specified. The latter consideration may be particularly important when off-target modifications are a concern, as titrating the amount of nuclease may decrease such mutations (Hsu et al., 2013). Another advantage of ex vivo approaches is the typically high editing rates that can be achieved, due to the development of efficient delivery systems for proteins and nucleic acids into cells in culture for research and gene therapy applications.

[1439] There may be drawbacks with ex vivo approaches that limit application to a small number of diseases. For instance, target cells must be capable of surviving manipulation outside the body. For many tissues, like the brain, culturing cells outside the body is a major challenge, because cells either fail to survive, or lose properties necessary for their function in vivo. Thus, in view of this disclosure and the knowledge in the art, ex vivo therapy as to tissues with adult stem cell populations amenable to ex vivo culture and manipulation, such as the hematopoietic system, by the CRISPR-Cas system are enabled. [Bunn, H. F. & Aster, J. Pathophysiology of blood disorders, (McGraw-Hill, New York, 2011)]

[1440] In vivo genome editing involves direct delivery of editing systems to cell types in their native tissues. In vivo editing allows diseases in which the affected cell population is not amenable to ex vivo manipulation to be treated. Furthermore, delivering nucleases to cells in situ allows for the treatment of multiple tissue and cell types. These properties probably allow in vivo treatment to be applied to a wider range of diseases than ex vivo therapies.

[1441] To date, in vivo editing has largely been achieved through the use of viral vectors with defined, tissue-specific tropism. Such vectors are currently limited in terms of cargo carrying capacity and tropism, restricting this mode of therapy to organ systems where transduction with clinically useful vectors is efficient, such as the liver, muscle and eye [Kotterman, M. A. & Schaffer, D. V. Nature reviews. Genetics 15, 445-451 (2014); Nguyen, T. H. & Ferry, N. Gene therapy 11 Suppl 1, S76-84 (2004); Boye, S. E., et al. Molecular therapy: the journal of the American Society of Gene Therapy 21, 509-519 (2013)].

[1442] A potential barrier for in vivo delivery is the immune response that may be created in response to the large amounts of virus necessary for treatment, but this phenomenon is not unique to genome editing and is observed with other virus based gene therapies [Bessis, N., et al. Gene therapy 11 Suppl 1, S10-17 (2004)]. It is also possible that peptides from editing nucleases themselves are presented on MHC Class I molecules to stimulate an immune response, although there is little evidence to support this happening at the preclinical level. Another major difficulty with this mode of therapy is controlling the distribution and consequently the dosage of genome editing nucleases in vivo, leading to off-target mutation profiles that may be difficult to predict. However, in view of this disclosure and the knowledge in the art, including the use of virus- and particle-based therapies being used in the treatment of cancers, in vivo modification of HSCs, for instance by delivery by either particle or virus, is within the ambit of the the skilled person.

[1443] Ex Vivo Editing Therapy: The long standing clinical expertise with the purification, culture and transplantation of hematopoietic cells has made diseases affecting the blood system such as SCID, Fanconi anemia, Wiskott-Aldrich syndrome and sickle cell anemia the focus of ex vivo editing therapy. Another reason to focus on hematopoietic cells is that, thanks to previous efforts to design gene therapy for blood disorders, delivery systems of relatively high efficiency already exist. With these advantages, this mode of therapy can be applied to diseases where edited cells possess a fitness advantage, so that a small number of engrafted, edited cells can expand and treat disease. One such disease is HIV, where infection results in a fitness disadvantage to CD4+ T cells.

[1444] Ex vivo editing therapy has been recently extended to include gene correction strategies. The barriers to HDR ex vivo were overcome in a recent paper from Genovese and colleagues, who achieved gene correction of a mutated IL2RG gene in hematopoietic stem cells (HSCs) obtained from a patient suffering from SCID-X1 [Genovese, P., et al. Nature 510, 235-240 (2014)]. Genovese et. al. accomplished gene correction in HSCs using a multimodal strategy. First, HSCs were transduced using integration-deficient lentivirus containing an HDR template encoding a therapeutic cDNA for IL2RG. Following transduction, cells were electroporated with mRNA encoding ZFNs targeting a mutational hotspot in IL2RG to stimulate HDR based gene correction. To increase HDR rates, culture conditions were optimized with small molecules to encourage HSC division. With optimized culture conditions, nucleases and HDR templates, gene corrected HSCs from the SCID-X1 patient were obtained in culture at therapeutically relevant rates. HSCs from unaffected individuals that underwent the same gene correction procedure could sustain long-term hematopoiesis in mice, the gold standard for HSC function. HSCs are capable of giving rise to all hematopoietic cell types and can be autologously transplanted, making them an extremely valuable cell population for all hematopoietic genetic disorders [Weissman, I. L. & Shizuru, J. A. Blood 112, 3543-3553 (2008)]. Gene corrected HSCs could, in principle, be used to treat a wide range of genetic blood disorders making this study an exciting breakthrough for therapeutic genome editing.

[1445] In Vivo Editing Therapy: In vivo editing can be used advantageously from this disclosure and the knowledge in the art. For organ systems where delivery is efficient, there have already been a number of exciting preclinical therapeutic successes. The first example of successful in vivo editing therapy was demonstrated in a mouse model of haemophilia B [Li, H., et al. Nature 475, 217-221 (2011)]. As noted earlier, Haemophilia B is an X-linked recessive disorder caused by loss-of-function mutations in the gene encoding Factor IX, a crucial component of the clotting cascade. Recovering Factor IX activity to above 1% of its levels in severely affected individuals can transform the disease into a significantly milder form, as infusion of recombinant Factor IX into such patients prophylactically from a young age to achieve such levels largely ameliorates clinical complications [Lofqvist, T., et al. Journal of internal medicine 241, 395-400 (1997)]. Thus, only low levels of HDR gene correction are necessary to change clinical outcomes for patients. In addition, Factor IX is synthesized and secreted by the liver, an organ that can be transduced efficiently by viral vectors encoding editing systems.

[1446] Using hepatotropic adeno-associated viral (AAV) serotypes encoding ZFNs and a corrective HDR template, up to 7% gene correction of a mutated, humanized Factor IX gene in the murine liver was achieved [Li, H., et al. Nature 475, 217-221 (2011)]. This resulted in improvement of clot formation kinetics, a measure of the function of the clotting cascade, demonstrating for the first time that in vivo editing therapy is not only feasible, but also efficacious. As discussed herein, the skilled person is positioned from the teachings herein and the knowledge in the art, e.g., Li to address Haemophilia B with a particle-containing HDR template and a CRISPR-Cas system that targets the mutation of the X-linked recessive disorder to reverse the loss-of-function mutation.

[1447] Building on this study, other groups have recently used in vivo genome editing of the liver with CRISPR-Cas to successfully treat a mouse model of hereditary tyrosinemia and to create mutations that provide protection against cardiovascular disease. These two distinct applications demonstrate the versatility of this approach for disorders that involve hepatic dysfunction [Yin, H., et al. Nature biotechnology 32, 551-553 (2014); Ding, Q., et al. Circulation research 115, 488-492 (2014)]. Application of in vivo editing to other organ systems are necessary to prove that this strategy is widely applicable. Currently, efforts to optimize both viral and non-viral vectors are underway to expand the range of disorders that can be treated with this mode of therapy [Kotterman, M. A. & Schaffer, D. V. Nature reviews. Genetics 15, 445-451 (2014); Yin, H., et al. Nature reviews. Genetics 15, 541-555 (2014)]. As discussed herein, the skilled person is positioned from the teachings herein and the knowledge in the art, e.g., Yin to address hereditary tyrosinemia with a particle-containing HDR template and a CRISPR-Cas system that targets the mutation.

[1448] Targeted deletion, therapeutic applications: Targeted deletion of genes may be preferred. Preferred are, therefore, genes involved in immunodeficiency disorder, hematologic condition, or genetic lysosomal storage disease, e.g., Hemophilia B, SCID, SCID-X1, ADA-SCID, Hereditary tyrosinemia, β-thalassemia, X-linked CGD, Wiskott-Aldrich syndrome, Fanconi anemia, adrenoleukodystrophy (ALD), metachromatic leukodystrophy (MLD), HIV/AIDS, other metabolic disorders, genes encoding mis-folded proteins involved in diseases, genes leading to loss-of-function involved in diseases; generally, mutations that can be targeted in an HSC, using any herein-discussed delivery system, with the particle system considered advantageous.

[1449] In the present invention, the immunogenicity of the CRISPR enzyme in particular may be reduced following the approach first set out in Tangri et al with respect to erythropoietin and subsequently developed. Accordingly, directed evolution or rational design may be used to reduce the immunogenicity of the CRISPR enzyme (for instance a Cpf1) in the host species (human or other species).

[1450] Genome editing: The CRISPR/Cas systems of the present invention can be used to correct genetic mutations that were previously attempted with limited success using TALEN and ZFN and lentiviruses, including as herein discussed; see also WO2013163628.

### Treating Disease of the Brain, Central Nervous and Immune Systems

[1451] The present invention also contemplates delivering the CRISPR-Cas system to the brain or neurons. For example, RNA interference (RNAi) offers therapeutic potential for this disorder by reducing the expression of HTT, the disease-causing gene of Huntington's disease (see, e.g., McBride et al., Molecular Therapy vol. 19 no. 12 Dec. 2011, pp. 2152-2162), therefore Applicant postulates that it may be used/and or adapted to the CRISPR-Cas system. The CRISPR-Cas system may be generated using an algorithm to reduce the off-targeting potential of antisense sequences. The CRISPR-Cas sequences may target either a sequence in exon 52 of mouse, rhesus or human huntingtin and expressed in a viral vector, such as AAV. Animals, including humans, may be injected with about three microinjections per hemisphere (six injections total): the first 1 mm rostral to the anterior commissure (12 μl) and the two remaining injections (12 μl and 10 μl, respectively) spaced 3 and 6 mm caudal to the first injection with 1e12 vg/ml of AAV at a rate of about 1 μl/minute, and the needle was left in place for an additional 5 minutes to allow the injectate to diffuse from the needle tip.

[1452] DiFiglia et al. (PNAS, Oct. 23, 2007, vol. 104, no. 43, 17204-17209) observed that single administration into the adult striatum of an siRNA targeting Htt can silence mutant Htt, attenuate neuronal pathology, and delay the abnormal behavioral phenotype observed in a rapid-onset, viral transgenic mouse model of HD. DiFiglia injected mice intrastriatally with 2 μl of Cy3-labeled cc-siRNA-Htt or unconjugated siRNA-Htt at 10 μM. A similar dosage of CRISPR Cas targeted to Htt may be contemplated for humans in the present invention, for example, about 5-10 ml of 10 μM CRISPR Cas targeted to Htt may be injected intrastriatally.

[1453] In another example, Boudreau et al. (Molecular Therapy vol. 17 no. 6 Jun. 2009) injects 5 μl of recombinant AAV serotype 2/1 vectors expressing htt-specific RNAi virus (at 4×1012 viral genomes/ml) into the straiatum. A similar dosage of CRISPR Cas targeted to Htt may be contemplated for humans in the present invention, for example, about 10-20 ml of 4×1012 viral genomes/ml) CRISPR Cas targeted to Htt may be injected intrastriatally.

[1454] In another example, a CRISPR Cas targeted to HTT may be administered continuously (see, e.g., Yu et al., Cell 150, 895-908, Aug. 31, 2012). Yu et al. utilizes osmotic pumps delivering 0.25 ml/hr (Model 2004) to deliver 300 mg/day of ss-siRNA or phosphate-buffered saline (PBS) (Sigma Aldrich) for 28 days, and pumps designed to deliver 0.5 l/hr (Model 2002) were used to deliver 75 mg/day of the positive control MOE ASO for 14 days. Pumps (Durect Corporation) were filled with ss-siRNA or MOE diluted in sterile PBS and then incubated at 37 C for 24 or 48 (Model 2004) hours prior to implantation. Mice were anesthetized with 2.5% isofluorane, and a midline incision was made at the base of the skull. Using stereotaxic guides, a cannula was implanted into the right lateral ventricle and secured with Loctite adhesive. A catheter attached to an Alzet osmotic mini pump was attached to the cannula, and the pump was placed subcutaneously in the midscapular area. The incision was closed with 5.0 nylon sutures. A similar dosage of CRISPR Cas targeted to Htt may be contemplated for humans in the present invention, for example, about 500 to 1000 g/day CRISPR Cas targeted to Htt may be administered.

[1455] In another example of continuous infusion, Stiles et al. (Experimental Neurology 233 (2012) 463-471) implanted an intraparenchymal catheter with a titanium needle tip into the right putamen. The catheter was connected to a SynchroMed® II Pump (Medtronic Neurological, Minneapolis, Minn.) subcutaneously implanted in the abdomen. After a 7 day infusion of phosphate buffered saline at 6 μL/day, pumps were re-filled with test article and programmed for continuous delivery for 7 days. About 2.3 to 11.52 mg/d of siRNA were infused at varying infusion rates of about 0.1 to 0.5 μL/min. A similar dosage of CRISPR Cas targeted to Htt may be contemplated for humans in the present invention, for example, about 20 to 200 mg/day CRISPR Cas targeted to Htt may be administered. In another example, the methods of US Patent Publication No. 20130253040 assigned to Sangamo may also be also be adapted from TALES to the nucleic acid-targeting system of the present invention for treating Huntington's Disease.

[1456] In another example, the methods of US Patent Publication No. 20130253040 (WO2013130824) assigned to Sangamo may also be also be adapted from TALES to the CRISPR Cas system of the present invention for treating Huntington's Disease.

[1457] WO2015089354 A1 in the name of The Broad Institute et al., hereby incorporated by reference, describes a targets for Huntington's Disease (HP). Possible target genes of CRISPR complex in regard to Huntington's Disease: PRKCE; IGF1; EP300; RCOR1; PRKCZ; HDAC4; and TGM2. Accordingly, one or more of PRKCE; IGF1; EP300; RCOR1; PRKCZ; HDAC4; and TGM2 may be selected as targets for Huntington's Disease in some embodiments of the present invention.

[1458] Other trinucleotide repeat disorders. These may include any of the following: Category I includes Huntington's disease (HD) and the spinocerebellar ataxias; Category II expansions are phenotypically diverse with heterogeneous expansions that are generally small in magnitude, but also found in the exons of genes; and Category III includes fragile X syndrome, myotonic dystrophy, two of the spinocerebellar ataxias, juvenile myoclonic epilepsy, and Friedreich's ataxia.

[1459] A further aspect of the invention relates to utilizing the CRISPR-Cas system for correcting defects in the EMP2A and EMP2B genes that have been identified to be associated with Lafora disease. Lafora disease is an autosomal recessive condition which is characterized by progressive myoclonus epilepsy which may start as epileptic seizures in adolescence. A few cases of the disease may be caused by mutations in genes yet to be identified. The disease causes seizures, muscle spasms, difficulty walking, dementia, and eventually death. There is currently no therapy that has proven effective against disease progression. Other genetic abnormalities associated with epilepsy may also be targeted by the CRISPR-Cas system and the underlying genetics is further described in Genetics of Epilepsy and Genetic Epilepsies, edited by Giuliano Avanzini, Jeffrey L. Noebels, Mariani Foundation Paediatric Neurology:20; 2009).

[1460] The methods of US Patent Publication No. 20110158957 assigned to Sangamo BioSciences, Inc. involved in inactivating T cell receptor (TCR) genes may also be modified to the CRISPR Cas system of the present invention. In another example, the methods of US Patent Publication No. 20100311124 assigned to Sangamo BioSciences, Inc. and US Patent Publication No. 20110225664 assigned to Cellectis, which are both involved in inactivating glutamine synthetase gene expression genes may also be modified to the CRISPR Cas system of the present invention.

[1461] Delivery options for the brain include encapsulation of CRISPR enzyme and guide RNA in the form of either DNA or RNA into liposomes and conjugating to molecular Trojan horses for trans-blood brain barrier (BBB) delivery. Molecular Trojan horses have been shown to be effective for delivery of B-gal expression vectors into the brain of non-human primates. The same approach can be used to delivery vectors containing CRISPR enzyme and guide RNA. For instance, Xia C F and Boado R J, Pardridge W M (“Antibody-mediated targeting of siRNA via the human insulin receptor using avidin-biotin technology.” Mol Pharm. 2009 May-June; 6(3):747-51. doi: 10.1021/mp800194) describes how delivery of short interfering RNA (siRNA) to cells in culture, and in vivo, is possible with combined use of a receptor-specific monoclonal antibody (mAb) and avidin-biotin technology. The authors also report that because the bond between the targeting mAb and the siRNA is stable with avidin-biotin technology, and RNAi effects at distant sites such as brain are observed in vivo following an intravenous administration of the targeted siRNA.

[1462] Zhang et al. (Mol Ther. 2003 January; 7(1):11-8.)) describe how expression plasmids encoding reporters such as luciferase were encapsulated in the interior of an “artificial virus” comprised of an 85 nm pegylated immunoliposome, which was targeted to the rhesus monkey brain in vivo with a monoclonal antibody (MAb) to the human insulin receptor (HIR). The HIRMAb enables the liposome carrying the exogenous gene to undergo transcytosis across the blood-brain barrier and endocytosis across the neuronal plasma membrane following intravenous injection. The level of luciferase gene expression in the brain was 50-fold higher in the rhesus monkey as compared to the rat. Widespread neuronal expression of the beta-galactosidase gene in primate brain was demonstrated by both histochemistry and confocal microscopy. The authors indicate that this approach makes feasible reversible adult transgenics in 24 hours. Accordingly, the use of immunoliposome is preferred. These may be used in conjunction with antibodies to target specific tissues or cell surface proteins.

### Alzheimer's Disease

[1463] US Patent Publication No. 20110023153, describes use of zinc finger nucleases to genetically modify cells, animals and proteins associated with Alzheimer's Disease. Once modified cells and animals may be further tested using known methods to study the effects of the targeted mutations on the development and/or progression of AD using measures commonly used in the study of AD—such as, without limitation, learning and memory, anxiety, depression, addiction, and sensory motor functions as well as assays that measure behavioral, functional, pathological, metaboloic and biochemical function.

[1464] The present disclosure comprises editing of any chromosomal sequences that encode proteins associated with AD. The AD-related proteins are typically selected based on an experimental association of the AD-related protein to an AD disorder. For example, the production rate or circulating concentration of an AD-related protein may be elevated or depressed in a population having an AD disorder relative to a population lacking the AD disorder. Differences in protein levels may be assessed using proteomic techniques including but not limited to Western blot, immunohistochemical staining, enzyme linked immunosorbent assay (ELISA), and mass spectrometry. Alternatively, the AD-related proteins may be identified by obtaining gene expression profiles of the genes encoding the proteins using genomic techniques including but not limited to DNA microarray analysis, serial analysis of gene expression (SAGE), and quantitative real-time polymerase chain reaction (Q-PCR).

[1465] Examples of Alzheimer's disease associated proteins may include the very low density lipoprotein receptor protein (VLDLR) encoded by the VLDLR gene, the ubiquitin-like modifier activating enzyme 1 (UBA1) encoded by the UBA1 gene, or the NEDD8-activating enzyme E1 catalytic subunit protein (UBE1C) encoded by the UBA3 gene, for example.

[1466] By way of non-limiting example, proteins associated with AD include but are not limited to the proteins listed as follows: Chromosomal Sequence Encoded Protein ALAS2 Delta-aminolevulinate synthase 2 (ALAS2) ABCA1 ATP-binding cassette transporter (ABCA1) ACE Angiotensin I-converting enzyme (ACE) APOE Apolipoprotein E precursor (APOE) APP amyloid precursor protein (APP) AQP1 aquaporin 1 protein (AQP1) BIN1 Myc box-dependent-interacting protein 1 or bridging integrator 1 protein (BIN1) BDNF brain-derived neurotrophic factor (BDNF) BTNL8 Butyrophilin-like protein 8 (BTNL8) C1ORF49 chromosome 1 open reading frame 49 CDH4 Cadherin-4 CHRNB2 Neuronal acetylcholine receptor subunit beta-2 CKLFSF2 CKLF-like MARVEL transmembrane domain-containing protein 2 (CKLFSF2) CLEC4E C-type lectin domain family 4, member e (CLEC4E) CLU clusterin protein (also known as apoplipoprotein J) CR1 Erythrocyte complement receptor 1 (CR1, also known as CD35, C3b/C4b receptor and immune adherence receptor) CR1L Erythrocyte complement receptor 1 (CR1L) CSF3R granulocyte colony-stimulating factor 3 receptor (CSF3R) CST3 Cystatin C or cystatin 3 CYP2C Cytochrome P450 2C DAPK1 Death-associated protein kinase 1 (DAPK1) ESR1 Estrogen receptor 1 FCAR Fc fragment of IgA receptor (FCAR, also known as CD89) FCGR3B Fc fragment of IgG, low affinity IIIb, receptor (FCGR3B or CD16b) FFA2 Free fatty acid receptor 2 (FFA2) FGA Fibrinogen (Factor I) GAB2 GRB2-associated-binding protein 2 (GAB2) GAB2 GRB2-associated-binding protein 2 (GAB2) GALP Galanin-like peptide GAPDHS Glyceraldehyde-3-phosphate dehydrogenase, spermatogenic (GAPDHS) GMPB GMBP HP Haptoglobin (HP) HTR7 5-hydroxytryptamine (serotonin) receptor 7 (adenylate cyclase-coupled) IDE Insulin degrading enzyme IF 127 IF 127 IFI6 Interferon, alpha-inducible protein 6 (IFI6) IFIT2 Interferon-induced protein with tetratricopeptide repeats 2 (IFIT2) IL1RN interleukin-1 receptor antagonist (IL-1RA) IL8RA Interleukin 8 receptor, alpha (IL8RA or CD181) IL8RB Interleukin 8 receptor, beta (IL8RB) JAG1 Jagged 1 (JAGi) KCNJ15 Potassium inwardly-rectifying channel, subfamily J, member 15 (KCNJ15) LRP6 Low-density lipoprotein receptor-related protein 6 (LRP6) MAPT microtubule-associated protein tau (MAPT) MARK4 MAP/microtubule affinity-regulating kinase 4 (MARK4) MPHOSPH1 M-phase phosphoprotein 1 MTHFR 5,10-methylenetetrahydrofolate reductase MX2 Interferon-induced GTP-binding protein Mx2 NBN Nibrin, also known as NBN NCSTN Nicastrin NIACR2 Niacin receptor 2 (NIACR2, also known as GPR109B) NMNAT3 nicotinamide nucleotide adenylyltransferase 3 NTM Neurotrimin (or HNT) ORM1 Orosmucoid 1 (ORM1) or Alpha-1-acid glycoprotein 1 P2RY13 P2Y purinoceptor 13 (P2RY13) PBEF1 Nicotinamide phosphoribosyltransferase (NAmPRTase or Nampt) also known as pre-B-cell colony-enhancing factor 1 (PBEF1) or visfatin PCK1 Phosphoenolpyruvate carboxykinase PICALM phosphatidylinositol binding clathrin assembly protein (PICALM) PLAU Urokinase-type plasminogen activator (PLAU) PLXNC1 Plexin C1 (PLXNC1) PRNP Prion protein PSEN1 presenilin 1 protein (PSEN1) PSEN2 presenilin 2 protein (PSEN2) PTPRA protein tyrosine phosphatase receptor type A protein (PTPRA) RALGPS2 Ral GEF with PH domain and SH3 binding motif 2 (RALGPS2) RGSL2 regulator of G-protein signaling like 2 (RGSL2) SELENBP1 Selenium binding protein 1 (SELNBP1) SLC25A37 Mitoferrin-1 SORL1 sortilin-related receptor L(DLR class) A repeats-containing protein (SORL1) TF Transferrin TFAM Mitochondrial transcription factor A TNF Tumor necrosis factor TNFRSF10C Tumor necrosis factor receptor superfamily member 10C (TNFRSF10C) TNFSF10 Tumor necrosis factor receptor superfamily, (TRAIL) member 10a (TNFSF10) UBA1 ubiquitin-like modifier activating enzyme 1 (UBA1) UBA3 NEDD8-activating enzyme E1 catalytic subunit protein (UBE1C) UBB ubiquitin B protein (UBB) UBQLN1 Ubiquilin-1 UCHL1 ubiquitin carboxyl-terminal esterase L1 protein (UCHL1) UCHL3 ubiquitin carboxyl-terminal hydrolase isozyme L3 protein (UCHL3) VLDLR very low density lipoprotein receptor protein (VLDLR).

[1467] In exemplary embodiments, the proteins associated with AD whose chromosomal sequence is edited may be the very low density lipoprotein receptor protein (VLDLR) encoded by the VLDLR gene, the ubiquitin-like modifier activating enzyme 1 (UBA1) encoded by the UBA1 gene, the NEDD8-activating enzyme E1 catalytic subunit protein (UBE1C) encoded by the UBA3 gene, the aquaporin 1 protein (AQP1) encoded by the AQP1 gene, the ubiquitin carboxyl-terminal esterase L1 protein (UCHL1) encoded by the UCHL1 gene, the ubiquitin carboxyl-terminal hydrolase isozyme L3 protein (UCHL3) encoded by the UCHL3 gene, the ubiquitin B protein (UBB) encoded by the UBB gene, the microtubule-associated protein tau (MAPT) encoded by the MAPT gene, the protein tyrosine phosphatase receptor type A protein (PTPRA) encoded by the PTPRA gene, the phosphatidylinositol binding clathrin assembly protein (PICALM) encoded by the PICALM gene, the clusterin protein (also known as apoplipoprotein J) encoded by the CLU gene, the presenilin 1 protein encoded by the PSEN1 gene, the presenilin 2 protein encoded by the PSEN2 gene, the sortilin-related receptor L(DLR class) A repeats-containing protein (SORL1) protein encoded by the SORL1 gene, the amyloid precursor protein (APP) encoded by the APP gene, the Apolipoprotein E precursor (APOE) encoded by the APOE gene, or the brain-derived neurotrophic factor (BDNF) encoded by the BDNF gene. In an exemplary embodiment, the genetically modified animal is a rat, and the edited chromosomal sequence encoding the protein associated with AD is as as follows: APP amyloid precursor protein (APP) NM_019288 AQP1 aquaporin 1 protein (AQP1) NM_012778 BDNF Brain-derived neurotrophic factor NM_012513 CLU clusterin protein (also known as NM_053021 apoplipoprotein J) MAPT microtubule-associated protein NM_017212 tau (MAPT) PICALM phosphatidylinositol binding NM_053554 clathrin assembly protein (PICALM) PSEN1 presenilin 1 protein (PSEN1) NM_019163 PSEN2 presenilin 2 protein (PSEN2) NM_031087 PTPRA protein tyrosine phosphatase NM_012763 receptor type A protein (PTPRA) SORL1 sortilin-related receptor L(DLR NM_053519, class) A repeats-containing XM_001065506, protein (SORL1) XM_217115 UBA1 ubiquitin-like modifier activating NM_001014080 enzyme 1 (UBA1) UBA3 NEDD8-activating enzyme E1 NM_057205 catalytic subunit protein (UBE1C) UBB ubiquitin B protein (UBB) NM_138895 UCHL1 ubiquitin carboxyl-terminal NM_017237 esterase L1 protein (UCHL1) UCHL3 ubiquitin carboxyl-terminal NM_001110165 hydrolase isozyme L3 protein (UCHL3) VLDLR very low density lipoprotein NM_013155 receptor protein (VLDLR)

[1468] The animal or cell may comprise 1, 2, 3, 4, 5, 6, 7, 8, 9, 10, 11, 12, 13, 14, 15 or more disrupted chromosomal sequences encoding a protein associated with AD and zero, 1, 2, 3, 4, 5, 6, 7, 8, 9, 10, 11, 12, 13, 14, 15 or more chromosomally integrated sequences encoding a protein associated with AD.

[1469] The edited or integrated chromosomal sequence may be modified to encode an altered protein associated with AD. A number of mutations in AD-related chromosomal sequences have been associated with AD. For instance, the V7171 (i.e. valine at position 717 is changed to isoleucine) missense mutation in APP causes familial AD. Multiple mutations in the presenilin-1 protein, such as H163R (i.e. histidine at position 163 is changed to arginine), A246E (i.e. alanine at position 246 is changed to glutamate), L286V (i.e. leucine at position 286 is changed to valine) and C410Y (i.e. cysteine at position 410 is changed to tyrosine) cause familial Alzheimer's type 3. Mutations in the presenilin-2 protein, such as N141 I (i.e. asparagine at position 141 is changed to isoleucine), M239V (i.e. methionine at position 239 is changed to valine), and D439A (i.e. aspartate at position 439 is changed to alanine) cause familial Alzheimer's type 4. Other associations of genetic variants in AD-associated genes and disease are known in the art. See, for example, Waring et al. (2008) Arch. Neurol. 65:329-334, the disclosure of which is incorporated by reference herein in its entirety.

### Secretase Disorders

[1470] US Patent Publication No. 20110023146, describes use of zinc finger nucleases to genetically modify cells, animals and proteins associated with secretase-associated disorders. Secretases are essential for processing pre-proteins into their biologically active forms. Defects in various components of the secretase pathways contribute to many disorders, particularly those with hallmark amyloidogenesis or amyloid plaques, such as Alzheimer's disease (AD).

[1471] A secretase disorder and the proteins associated with these disorders are a diverse set of proteins that effect susceptibility for numerous disorders, the presence of the disorder, the severity of the disorder, or any combination thereof. The present disclosure comprises editing of any chromosomal sequences that encode proteins associated with a secretase disorder. The proteins associated with a secretase disorder are typically selected based on an experimental association of the secretase—related proteins with the development of a secretase disorder. For example, the production rate or circulating concentration of a protein associated with a secretase disorder may be elevated or depressed in a population with a secretase disorder relative to a population without a secretase disorder. Differences in protein levels may be assessed using proteomic techniques including but not limited to Western blot, immunohistochemical staining, enzyme linked immunosorbent assay (ELISA), and mass spectrometry. Alternatively, the protein associated with a secretase disorder may be identified by obtaining gene expression profiles of the genes encoding the proteins using genomic techniques including but not limited to DNA microarray analysis, serial analysis of gene expression (SAGE), and quantitative real-time polymerase chain reaction (Q-PCR).

[1472] By way of non-limiting example, proteins associated with a secretase disorder include PSENEN (presenilin enhancer 2 homolog (C. elegans)), CTSB (cathepsin B), PSEN1 (presenilin 1), APP (amyloid beta (A4) precursor protein), APH1B (anterior pharynx defective 1 homolog B (C. elegans)), PSEN2 (presenilin 2 (Alzheimer disease 4)), BACE1 (beta-site APP-cleaving enzyme 1), ITM2B (integral membrane protein 2B), CTSD (cathepsin D), NOTCH1 (Notch homolog 1, translocation-associated (Drosophila)), TNF (tumor necrosis factor (TNF superfamily, member 2)), INS (insulin), DYT10 (dystonia 10), ADAM17 (ADAM metallopeptidase domain 17), APOE (apolipoprotein E), ACE (angiotensin I converting enzyme (peptidyl-dipeptidase A) 1), STN (statin), TP53 (tumor protein p53), IL6 (interleukin 6 (interferon, beta 2)), NGFR (nerve growth factor receptor (TNFR superfamily, member 16)), IL1B (interleukin 1, beta), ACHE (acetylcholinesterase (Yt blood group)), CTNNB1 (catenin (cadherin-associated protein), beta 1, 88 kDa), IGF1 (insulin-like growth factor 1 (somatomedin C)), IFNG (interferon, gamma), NRG1 (neuregulin 1), CASP3 (caspase 3, apoptosis-related cysteine peptidase), MAPK1 (mitogen-activated protein kinase 1), CDH1 (cadherin 1, type 1, E-cadherin (epithelial)), APBB 1 (amyloid beta (A4) precursor protein-binding, family B, member 1 (Fe65)), HMGCR (3-hydroxy-3-methylglutaryl-Coenzyme A reductase), CREB1 (cAMP responsive element binding protein 1), PTGS2 (prostaglandin-endoperoxide synthase 2 (prostaglandin G/H synthase and cyclooxygenase)), HES1 (hairy and enhancer of split 1, (Drosophila)), CAT (catalase), TGFB1 (transforming growth factor, beta 1), ENO2 (enolase 2 (gamma, neuronal)), ERBB4 (v-erb-a erythroblastic leukemia viral oncogene homolog 4 (avian)), TRAPPC 10 (trafficking protein particle complex 10), MAOB (monoamine oxidase B), NGF (nerve growth factor (beta polypeptide)), MMP12 (matrix metallopeptidase 12 (macrophage elastase)), JAG1 (jagged 1 (Alagille syndrome)), CD40LG (CD40 ligand), PPARG (peroxisome proliferator-activated receptor gamma), FGF2 (fibroblast growth factor 2 (basic)), IL3 (interleukin 3 (colony-stimulating factor, multiple)), LRP1 (low density lipoprotein receptor-related protein 1), NOTCH4 (Notch homolog 4 (Drosophila)), MAPK8 (mitogen-activated protein kinase 8), PREP (prolyl endopeptidase), NOTCH3 (Notch homolog 3 (Drosophila)), PRNP (prion protein), CTSG (cathepsin G), EGF (epidermal growth factor (beta-urogastrone)), REN (renin), CD44 (CD44 molecule (Indian blood group)), SELP (selectin P (granule membrane protein 140 kDa, antigen CD62)), GHR (growth hormone receptor), ADCYAP1 (adenylate cyclase activating polypeptide 1 (pituitary)), INSR (insulin receptor), GFAP (glial fibrillary acidic protein), MMP3 (matrix metallopeptidase 3 (stromelysin 1, progelatinase)), MAPK10 (mitogen-activated protein kinase 10), SP1 (Sp1 transcription factor), MYC (v-myc myelocytomatosis viral oncogene homolog (avian)), CTSE (cathepsin E), PPARA (peroxisome proliferator-activated receptor alpha), JUN (jun oncogene), TIMP1 (TIMP metallopeptidase inhibitor 1), IL5 (interleukin 5 (colony-stimulating factor, eosinophil)), IL1A (interleukin 1, alpha), MMP9 (matrix metallopeptidase 9 (gelatinase B, 92 kDa gelatinase, 92 kDa type IV collagenase)), HTR4 (5-hydroxytryptamine (serotonin) receptor 4), HSPG2 (heparan sulfate proteoglycan 2), KRAS (v-Ki-ras2 Kirsten rat sarcoma viral oncogene homolog), CYCS (cytochrome c, somatic), SMG1 (SMG1 homolog, phosphatidylinositol 3-kinase-related kinase (C. elegans)), IL1R1 (interleukin 1 receptor, type I), PROK1 (prokineticin 1), MAPK3 (mitogen-activated protein kinase 3), NTRK1 (neurotrophic tyrosine kinase, receptor, type 1), IL13 (interleukin 13), MME (membrane metallo-endopeptidase), TKT (transketolase), CXCR2 (chemokine (C-X-C motif) receptor 2), IGF1R (insulin-like growth factor 1 receptor), RARA (retinoic acid receptor, alpha), CREBBP (CREB binding protein), PTGS1 (prostaglandin-endoperoxide synthase 1 (prostaglandin G/H synthase and cyclooxygenase)), GALT (galactose-1-phosphate uridylyltransferase), CHRM1 (cholinergic receptor, muscarinic 1), ATXN1 (ataxin 1), PAWR (PRKC, apoptosis, WT1, regulator), NOTCH2 (Notch homolog 2 (Drosophila)), M6PR (mannose-6-phosphate receptor (cation dependent)), CYP46A1 (cytochrome P450, family 46, subfamily A, polypeptide 1), CSNK1 D (casein kinase 1, delta), MAPK14 (mitogen-activated protein kinase 14), PRG2 (proteoglycan 2, bone marrow (natural killer cell activator, eosinophil granule major basic protein)), PRKCA (protein kinase C, alpha), L1 CAM (L1 cell adhesion molecule), CD40 (CD40 molecule, TNF receptor superfamily member 5), NR1I2 (nuclear receptor subfamily 1, group I, member 2), JAG2 (jagged 2), CTNND1 (catenin (cadherin-associated protein), delta 1), CDH2 (cadherin 2, type 1, N-cadherin (neuronal)), CMA1 (chymase 1, mast cell), SORT1 (sortilin 1), DLK1 (delta-like 1 homolog (Drosophila)), THEM4 (thioesterase superfamily member 4), JUP (junction plakoglobin), CD46 (CD46 molecule, complement regulatory protein), CCL11 (chemokine (C-C motif) ligand 11), CAV3 (caveolin 3), RNASE3 (ribonuclease, RNase A family, 3 (eosinophil cationic protein)), HSPA8 (heat shock 70 kDa protein 8), CASP9 (caspase 9, apoptosis-related cysteine peptidase), CYP3A4 (cytochrome P450, family 3, subfamily A, polypeptide 4), CCR3 (chemokine (C-C motif) receptor 3), TFAP2A (transcription factor AP-2 alpha (activating enhancer binding protein 2 alpha)), SCP2 (sterol carrier protein 2), CDK4 (cyclin-dependent kinase 4), HIF1A (hypoxia inducible factor 1, alpha subunit (basic helix-loop-helix transcription factor)), TCF7L2 (transcription factor 7-like 2 (T-cell specific, HMG-box)), IL1R2 (interleukin 1 receptor, type II), B3GALTL (beta 1,3-galactosyltransferase-like), MDM2 (Mdm2 p53 binding protein homolog (mouse)), RELA (v-rel reticuloendotheliosis viral oncogene homolog A (avian)), CASP7 (caspase 7, apoptosis-related cysteine peptidase), IDE (insulin-degrading enzyme), FABP4 (fatty acid binding protein 4, adipocyte), CASK (calcium/calmodulin-dependent serine protein kinase (MAGUK family)), ADCYAP1R1 (adenylate cyclase activating polypeptide 1 (pituitary) receptor type I), ATF4 (activating transcription factor 4 (tax-responsive enhancer element B67)), PDGFA (platelet-derived growth factor alpha polypeptide), C21 or f33 (chromosome 21 open reading frame 33), SCG5 (secretogranin V (7B2 protein)), RNF 123 (ring finger protein 123), NFKB 1 (nuclear factor of kappa light polypeptide gene enhancer in B-cells 1), ERBB2 (v-erb-b2 erythroblastic leukemia viral oncogene homolog 2, neuro/glioblastoma derived oncogene homolog (avian)), CAV1 (caveolin 1, caveolae protein, 22 kDa), MMP7 (matrix metallopeptidase 7 (matrilysin, uterine)), TGFA (transforming growth factor, alpha), RXRA (retinoid X receptor, alpha), STX1A (syntaxin 1A (brain)), PSMC4 (proteasome (prosome, macropain) 26S subunit, ATPase, 4), P2RY2 (purinergic receptor P2Y, G-protein coupled, 2), TNFRSF21 (tumor necrosis factor receptor superfamily, member 21), DLG1 (discs, large homolog 1 (Drosophila)), NUMBL (numb homolog (Drosophila)-like), SPN (sialophorin), PLSCR1 (phospholipid scramblase 1), UBQLN2 (ubiquilin 2), UBQLN1 (ubiquilin 1), PCSK7 (proprotein convertase subtilisin/kexin type 7), SPON1 (spondin 1, extracellular matrix protein), SILV (silver homolog (mouse)), QPCT (glutaminyl-peptide cyclotransferase), HESS (hairy and enhancer of split 5 (Drosophila)), GCC1 (GRIP and coiled-coil domain containing 1), and any combination thereof.

[1473] The genetically modified animal or cell may comprise 1, 2, 3, 4, 5, 6, 7, 8, 9, 10 or more disrupted chromosomal sequences encoding a protein associated with a secretase disorder and zero, 1, 2, 3, 4, 5, 6, 7, 8, 9, 10 or more chromosomally integrated sequences encoding a disrupted protein associated with a secretase disorder.

### ALS

[1474] US Patent Publication No. 20110023144, describes use of zinc finger nucleases to genetically modify cells, animals and proteins associated with amyotrophyic lateral sclerosis (ALS) disease. ALS is characterized by the gradual steady degeneration of certain nerve cells in the brain cortex, brain stem, and spinal cord involved in voluntary movement.

[1475] Motor neuron disorders and the proteins associated with these disorders are a diverse set of proteins that effect susceptibility for developing a motor neuron disorder, the presence of the motor neuron disorder, the severity of the motor neuron disorder or any combination thereof. The present disclosure comprises editing of any chromosomal sequences that encode proteins associated with ALS disease, a specific motor neuron disorder. The proteins associated with ALS are typically selected based on an experimental association of ALS—related proteins to ALS. For example, the production rate or circulating concentration of a protein associated with ALS may be elevated or depressed in a population with ALS relative to a population without ALS. Differences in protein levels may be assessed using proteomic techniques including but not limited to Western blot, immunohistochemical staining, enzyme linked immunosorbent assay (ELISA), and mass spectrometry. Alternatively, the proteins associated with ALS may be identified by obtaining gene expression profiles of the genes encoding the proteins using genomic techniques including but not limited to DNA microarray analysis, serial analysis of gene expression (SAGE), and quantitative real-time polymerase chain reaction (Q-PCR).

[1476] By way of non-limiting example, proteins associated with ALS include but are not limited to the following proteins: SOD1 superoxide dismutase 1, ALS3 amyotrophic lateral soluble sclerosis 3 SETX senataxin ALS5 amyotrophic lateral sclerosis 5 FUS fused in sarcoma ALS7 amyotrophic lateral sclerosis 7 ALS2 amyotrophic lateral DPP6 Dipeptidyl-peptidase 6 sclerosis 2 NEFH neurofilament, heavy PTGS1 prostaglandin-polypeptide endoperoxide synthase 1 SLC1A2 solute carrier family 1 TNFRSF10B tumor necrosis factor (glial high affinity receptor superfamily, glutamate transporter), member 10b member 2 PRPH peripherin HSP90AA1 heat shock protein 90 kDa alpha (cytosolic), class A member 1 GRIA2 glutamate receptor, IFNG interferon, gamma ionotropic, AMPA 2 S100B S100 calcium binding FGF2 fibroblast growth factor 2 protein B AOX1 aldehyde oxidase 1 CS citrate synthase TARDBP TAR DNA binding protein TXN thioredoxin RAPH1 Ras association MAP3K5 mitogen-activated protein (RaIGDS/AF-6) and kinase 5 pleckstrin homology domains 1 NBEAL1 neurobeachin-like 1 GPX1 glutathione peroxidase 1 ICA1L islet cell autoantigen RAC1 ras-related C3 botulinum 1.69 kDa-like toxin substrate 1 MAPT microtubule-associated ITPR2 inositol 1,4,5-protein tau triphosphate receptor, type 2 ALS2CR4 amyotrophic lateral GLS glutaminase sclerosis 2 (juvenile) chromosome region, candidate 4 ALS2CR8 amyotrophic lateral CNTFR ciliary neurotrophic factor sclerosis 2 (juvenile) receptor chromosome region, candidate 8 ALS2CR11 amyotrophic lateral FOLH1 folate hydrolase 1 sclerosis 2 (juvenile) chromosome region, candidate 11 FAM117B family with sequence P4HB prolyl 4-hydroxylase, similarity 117, member B beta polypeptide CNTF ciliary neurotrophic factor SQSTM1 sequestosome 1 STRADB STE20-related kinase NAIP NLR family, apoptosis adaptor beta inhibitory protein YWHAQ tyrosine 3-SLC33A1 solute carrier family 33 monooxygenase/tryptoph (acetyl-CoA transporter), an 5-monooxygenase member 1 activation protein, theta polypeptide TRAK2 trafficking protein, homolog, SAC1 kinesin binding 2 lipid phosphatase domain containing NIF3L1 NIF3 NGG1 interacting INA internexin neuronal factor 3-like 1 intermediate filament protein, alpha PARD3B par-3 partitioning COX8A cytochrome c oxidase defective 3 homolog B subunit VIIIA CDK15 cyclin-dependent kinase HECW1 HECT, C2 and WW 15 domain containing E3 ubiquitin protein ligase 1 NOS1 nitric oxide synthase 1 MET met proto-oncogene SOD2 superoxide dismutase 2, HSPB1 heat shock 27 kDa mitochondrial protein 1 NEFL neurofilament, light CTSB cathepsin B polypeptide ANG angiogenin, HSPA8 heat shock 70 kDa ribonuclease, RNase A protein 8 family, 5 VAPB VAMP (vesicle-ESR1 estrogen receptor 1 associated membrane protein)-associated protein B and C SNCA synuclein, alpha HGF hepatocyte growth factor CAT catalase ACTB actin, beta NEFM neurofilament, medium TH tyrosine hydroxylase polypeptide BCL2 B-cell CLL/lymphoma 2 FAS Fas (TNF receptor superfamily, member 6) CASP3 caspase 3, apoptosis-CLU clusterin related cysteine peptidase SMN1 survival of motor neuron G6PD glucose-6-phosphate 1, telomeric dehydrogenase BAX BCL2-associated X HSF1 heat shock transcription protein factor 1 RNF19A ring finger protein 19A JUN jun oncogene ALS2CR12 amyotrophic lateral HSPA5 heat shock 70 kDa sclerosis 2 (juvenile) protein 5 chromosome region, candidate 12 MAPK14 mitogen-activated protein IL10 interleukin 10 kinase 14 APEX1 APEX nuclease TXNRD1 thioredoxin reductase 1 (multifunctional DNA repair enzyme) 1 NOS2 nitric oxide synthase 2, TIMP1 TIMP metallopeptidase inducible inhibitor 1 CASP9 caspase 9, apoptosis-XIAP X-linked inhibitor of related cysteine apoptosis peptidase GLG1 golgi glycoprotein 1 EPO erythropoietin VEGFA vascular endothelial ELN elastin growth factor A GDNF glial cell derived NFE2L2 nuclear factor (erythroid-neurotrophic factor derived 2)-like 2 SLC6A3 solute carrier family 6 HSPA4 heat shock 70 kDa (neurotransmitter protein 4 transporter, dopamine), member 3 APOE apolipoprotein E PSMB8 proteasome (prosome, macropain) subunit, beta type, 8 DCTN1 dynactin 1 TIMP3 TIMP metallopeptidase inhibitor 3 KIFAP3 kinesin-associated SLC1A1 solute carrier family 1 protein 3 (neuronal/epithelial high affinity glutamate transporter, system Xag), member 1 SMN2 survival of motor neuron CCNC cyclin C 2, centromeric MPP4 membrane protein, STUB1 STIP1 homology and U-palmitoylated 4 box containing protein 1 ALS2 amyloid beta (A4) PRDX6 peroxiredoxin 6 precursor protein SYP synaptophysin CABIN1 calcineurin binding protein 1 CASP1 caspase 1, apoptosis-GART phosphoribosylglycinami related cysteine de formyltransferase, peptidase phosphoribosylglycinami de synthetase, phosphoribosylaminoimi dazole synthetase CDK5 cyclin-dependent kinase 5 ATXN3 ataxin 3 RTN4 reticulon 4 C1QB complement component 1, q subcomponent, B chain VEGFC nerve growth factor HTT huntingtin receptor PARK7 Parkinson disease 7 XDH xanthine dehydrogenase GFAP glial fibrillary acidic MAP2 microtubule-associated protein protein 2 CYCS cytochrome c, somatic FCGR3B Fc fragment of IgG, low affinity IIIb, CCS copper chaperone for UBL5 ubiquitin-like 5 superoxide dismutase MMP9 matrix metallopeptidase SLC18A3 solute carrier family 18 9 ((vesicular acetylcholine), member 3 TRPM7 transient receptor HSPB2 heat shock 27 kDa potential cation channel, protein 2 subfamily M, member 7 AKT1 v-akt murine thymoma DERL1 Derl-like domain family, viral oncogene homolog 1 member 1 CCL2 chemokine (C-C motif) NGRN neugrin, neurite ligand 2 outgrowth associated GSR glutathione reductase TPPP3 tubulin polymerization-promoting protein family member 3 APAF1 apoptotic peptidase BTBD10 BTB (POZ) domain activating factor 1 containing 10 GLUD1 glutamate CXCR4 chemokine (C—X—C motif) dehydrogenase 1 receptor 4 SLC1A3 solute carrier family 1 FLT1 fms-related tyrosine (glial high affinity glutamate transporter), member 3 kinase 1 PON1 paraoxonase 1 AR androgen receptor LIF leukemia inhibitory factor ERBB3 v-erb-b2 erythroblastic leukemia viral oncogene homolog 3 LGALS1 lectin, galactoside-CD44 CD44 molecule binding, soluble, 1 TP53 tumor protein p53 TLR3 toll-like receptor 3 GRIA1 glutamate receptor, GAPDH glyceraldehyde-3-ionotropic, AMPA 1 phosphate dehydrogenase GRIK1 glutamate receptor, DES desmin ionotropic, kainate 1 CHAT choline acetyltransferase FLT4 fms-related tyrosine kinase 4 CHMP2B chromatin modifying BAG1 BCL2-associated protein 2B athanogene MT3 metallothionein 3 CHRNA4 cholinergic receptor, nicotinic, alpha 4 GSS glutathione synthetase BAK1 BCL2-antagonist/killer 1 KDR kinase insert domain GSTP1 glutathione S-transferase receptor (a type III pi 1 receptor tyrosine kinase) OGG1 8-oxoguanine DNA IL6 interleukin 6 (interferon, glycosylase beta 2).

[1477] The animal or cell may comprise 1, 2, 3, 4, 5, 6, 7, 8, 9, 10 or more disrupted chromosomal sequences encoding a protein associated with ALS and zero, 1, 2, 3, 4, 5, 6, 7, 8, 9, 10 or more chromosomally integrated sequences encoding the disrupted protein associated with ALS. Preferred proteins associated with ALS include SOD1 (superoxide dismutase 1), ALS2 (amyotrophic lateral sclerosis 2), FUS (fused in sarcoma), TARDBP (TAR DNA binding protein), VAGFA (vascular endothelial growth factor A), VAGFB (vascular endothelial growth factor B), and VAGFC (vascular endothelial growth factor C), and any combination thereof. Autism

[1478] US Patent Publication No. 20110023145, describes use of zinc finger nucleases to genetically modify cells, animals and proteins associated with autism spectrum disorders (ASD). Autism spectrum disorders (ASDs) are a group of disorders characterized by qualitative impairment in social interaction and communication, and restricted repetitive and stereotyped patterns of behavior, interests, and activities. The three disorders, autism, Asperger syndrome (AS) and pervasive developmental disorder-not otherwise specified (PDD-NOS) are a continuum of the same disorder with varying degrees of severity, associated intellectual functioning and medical conditions. ASDs are predominantly genetically determined disorders with a heritability of around 90%.

[1479] US Patent Publication No. 20110023145 comprises editing of any chromosomal sequences that encode proteins associated with ASD which may be applied to the CRISPR Cas system of the present invention. The proteins associated with ASD are typically selected based on an experimental association of the protein associated with ASD to an incidence or indication of an ASD. For example, the production rate or circulating concentration of a protein associated with ASD may be elevated or depressed in a population having an ASD relative to a population lacking the ASD. Differences in protein levels may be assessed using proteomic techniques including but not limited to Western blot, immunohistochemical staining, enzyme linked immunosorbent assay (ELISA), and mass spectrometry. Alternatively, the proteins associated with ASD may be identified by obtaining gene expression profiles of the genes encoding the proteins using genomic techniques including but not limited to DNA microarray analysis, serial analysis of gene expression (SAGE), and quantitative real-time polymerase chain reaction (Q-PCR).

[1480] Non limiting examples of disease states or disorders that may be associated with proteins associated with ASD include autism, Asperger syndrome (AS), pervasive developmental disorder-not otherwise specified (PDD-NOS), Rett's syndrome, tuberous sclerosis, phenylketonuria, Smith-Lemli-Opitz syndrome and fragile X syndrome. By way of non-limiting example, proteins associated with ASD include but are not limited to the following proteins: ATP10C aminophospholipid-MET MET receptor transporting ATPase tyrosine kinase (ATP10C) BZRAP1 MGLUR5 (GRM5) Metabotropic glutamate receptor 5 (MGLUR5) CDH10 Cadherin-10 MGLUR6 (GRM6) Metabotropic glutamate receptor 6 (MGLUR6) CDH9 Cadherin-9 NLGN1 Neuroligin-1 CNTN4 Contactin-4 NLGN2 Neuroligin-2 CNTNAP2 Contactin-associated SEMA5A Neuroligin-3 protein-like 2 (CNTNAP2) DHCR7 7-dehydrocholesterol NLGN4X Neuroligin-4 X-reductase (DHCR7) linked DOC2A Double C2-like domain-NLGN4Y Neuroligin-4 Y-containing protein alpha linked DPP6 Dipeptidyl NLGN5 Neuroligin-5 aminopeptidase-like protein 6 EN2 engrailed 2 (EN2) NRCAM Neuronal cell adhesion molecule (NRCAM) MDGA2 fragile X mental retardation NRXN1 Neurexin-11 (MDGA2) FMR2 (AFF2) AF4/FMR2 family member 2 OR4M2 Olfactory receptor (AFF2) 4M2 FOXP2 Forkhead box protein P2 OR4N4 Olfactory receptor (FOXP2) 4N4 FXR1 Fragile X mental OXTR oxytocin receptor retardation, autosomal (OXTR) homolog 1 (FXR1) FXR2 Fragile X mental PAH phenylalanine retardation, autosomal hydroxylase (PAH) homolog 2 (FXR2) GABRA1 Gamma-aminobutyric acid PTEN Phosphatase and receptor subunit alpha-1 tensin homologue (GABRA1) (PTEN) GABRA5 GABAA (.gamma.-aminobutyric PTPRZ1 Receptor-type acid) receptor alpha 5 tyrosine-protein subunit (GABRA5) phosphatase zeta (PTPRZ1) GABRB1 Gamma-aminobutyric acid RELN Reelin receptor subunit beta-1 (GABRBi) GABRB3 GABAA (.gamma.-aminobutyric RPL10 60S ribosomal acid) receptor .beta.3 subunit protein L10 (GABRB3) GABRG1 Gamma-aminobutyric acid SEMA5A Semaphorin-5A receptor subunit gamma-1 (SEMA5A) (GABRGi) HIRIP3 HIRA-interacting protein 3 SEZ6L2 seizure related 6 homolog (mouse)-like 2 HOXA1 Homeobox protein Hox-A1 SHANK3 SH3 and multiple (HOXA1) ankyrin repeat domains 3 (SHANK3) IL6 Interleukin-6 SHBZRAP1 SH3 and multiple ankyrin repeat domains 3 (SHBZRAP1) LAMB1 Laminin subunit beta-1 SLC6A4 Serotonin (LAMB1) transporter (SERT) MAPK3 Mitogen-activated protein TAS2R1 Taste receptor kinase 3 type 2 member 1 TAS2R1 MAZ Myc-associated zinc finger TSC1 Tuberous sclerosis protein protein 1 MDGA2 MAM domain containing TSC2 Tuberous sclerosis glycosylphosphatidylinositol protein 2 anchor 2 (MDGA2) MECP2 Methyl CpG binding UBE3A Ubiquitin protein protein 2 (MECP2) ligase E3A (UBE3A) MECP2 methyl CpG binding WNT2 Wingless-type protein 2 (MECP2) MMTV integration site family, member 2 (WNT2)

[1481] The identity of the protein associated with ASD whose chromosomal sequence is edited can and will vary. In preferred embodiments, the proteins associated with ASD whose chromosomal sequence is edited may be the benzodiazapine receptor (peripheral) associated protein 1 (BZRAP1) encoded by the BZRAP1 gene, the AF4/FMR2 family member 2 protein (AFF2) encoded by the AFF2 gene (also termed MFR2), the fragile X mental retardation autosomal homolog 1 protein (FXR1) encoded by the FXR1 gene, the fragile X mental retardation autosomal homolog 2 protein (FXR2) encoded by the FXR2 gene, the MAM domain containing glycosylphosphatidylinositol anchor 2 protein (MDGA2) encoded by the MDGA2 gene, the methyl CpG binding protein 2 (MECP2) encoded by the MECP2 gene, the metabotropic glutamate receptor 5 (MGLUR5) encoded by the MGLUR5-1 gene (also termed GRM5), the neurexin 1 protein encoded by the NRXN1 gene, or the semaphorin-5A protein (SEMA5A) encoded by the SEMA5A gene. In an exemplary embodiment, the genetically modified animal is a rat, and the edited chromosomal sequence encoding the protein associated with ASD is as listed below: BZRAP1 benzodiazapine receptor XM_002727789, (peripheral) associated XM_213427, protein 1 (BZRAP1) XM_002724533, XM_001081125 AFF2 (FMR2) AF4/FMR2 family member 2 XM_219832, (AFF2) XM_001054673 FXR1 Fragile X mental NM_001012179 retardation, autosomal homolog 1 (FXR1) FXR2 Fragile X mental NM_001100647 retardation, autosomal homolog 2 (FXR2) MDGA2 MAM domain containing NM_199269 glycosylphosphatidylinositol anchor 2 (MDGA2) MECP2 Methyl CpG binding NM_022673 protein 2 (MECP2) MGLUR5 Metabotropic glutamate NM_017012 (GRM5) receptor 5 (MGLUR5) NRXN1 Neurexin-1 NM_021767 SEMA5A Semaphorin-5A (SEMA5A) NM 001107659.

### Trinucleotide Repeat Expansion Disorders

[1482] US Patent Publication No. 20110016540, describes use of zinc finger nucleases to genetically modify cells, animals and proteins associated with trinucleotide repeat expansion disorders. Trinucleotide repeat expansion disorders are complex, progressive disorders that involve developmental neurobiology and often affect cognition as well as sensory-motor functions.

[1483] Trinucleotide repeat expansion proteins are a diverse set of proteins associated with susceptibility for developing a trinucleotide repeat expansion disorder, the presence of a trinucleotide repeat expansion disorder, the severity of a trinucleotide repeat expansion disorder or any combination thereof. Trinucleotide repeat expansion disorders are divided into two categories determined by the type of repeat. The most common repeat is the triplet CAG, which, when present in the coding region of a gene, codes for the amino acid glutamine (Q). Therefore, these disorders are referred to as the polyglutamine (polyQ) disorders and comprise the following diseases: Huntington Disease (HD); Spinobulbar Muscular Atrophy (SBMA); Spinocerebellar Ataxias (SCA types 1, 2, 3, 6, 7, and 17); and Dentatorubro-Pallidoluysian Atrophy (DRPLA). The remaining trinucleotide repeat expansion disorders either do not involve the CAG triplet or the CAG triplet is not in the coding region of the gene and are, therefore, referred to as the non-polyglutamine disorders. The non-polyglutamine disorders comprise Fragile X Syndrome (FRAXA); Fragile XE Mental Retardation (FRAXE); Friedreich Ataxia (FRDA); Myotonic Dystrophy (DM); and Spinocerebellar Ataxias (SCA types 8, and 12).

[1484] The proteins associated with trinucleotide repeat expansion disorders are typically selected based on an experimental association of the protein associated with a trinucleotide repeat expansion disorder to a trinucleotide repeat expansion disorder. For example, the production rate or circulating concentration of a protein associated with a trinucleotide repeat expansion disorder may be elevated or depressed in a population having a trinucleotide repeat expansion disorder relative to a population lacking the trinucleotide repeat expansion disorder. Differences in protein levels may be assessed using proteomic techniques including but not limited to Western blot, immunohistochemical staining, enzyme linked immunosorbent assay (ELISA), and mass spectrometry. Alternatively, the proteins associated with trinucleotide repeat expansion disorders may be identified by obtaining gene expression profiles of the genes encoding the proteins using genomic techniques including but not limited to DNA microarray analysis, serial analysis of gene expression (SAGE), and quantitative real-time polymerase chain reaction (Q-PCR).

[1485] Non-limiting examples of proteins associated with trinucleotide repeat expansion disorders include AR (androgen receptor), FMR1 (fragile X mental retardation 1), HTT (huntingtin), DMPK (dystrophia myotonica-protein kinase), FXN (frataxin), ATXN2 (ataxin 2), ATN1 (atrophin 1), FEN1 (flap structure-specific endonuclease 1), TNRC6A (trinucleotide repeat containing 6A), PABPN1 (poly(A) binding protein, nuclear 1), JPH3 (junctophilin 3), MED15 (mediator complex subunit 15), ATXN1 (ataxin 1), ATXN3 (ataxin 3), TBP (TATA box binding protein), CACNA1A (calcium channel, voltage-dependent, P/Q type, alpha 1A subunit), ATXN80S (ATXN8 opposite strand (non-protein coding)), PPP2R2B (protein phosphatase 2, regulatory subunit B, beta), ATXN7 (ataxin 7), TNRC6B (trinucleotide repeat containing 6B), TNRC6C (trinucleotide repeat containing 6C), CELF3 (CUGBP, Elav-like family member 3), MAB21L1 (mab-21-like 1 (C. elegans)), MSH2 (mutS homolog 2, colon cancer, nonpolyposis type 1 (E. coli)), TMEM185A (transmembrane protein 185A), SIX5 (SIX homeobox 5), CNPY3 (canopy 3 homolog (zebrafish)), FRAXE (fragile site, folic acid type, rare, fra(X)(q28) E), GNB2 (guanine nucleotide binding protein (G protein), beta polypeptide 2), RPL14 (ribosomal protein L14), ATXN8 (ataxin 8), INSR (insulin receptor), TTR (transthyretin), EP400 (E1A binding protein p400), GIGYF2 (GRB10 interacting GYF protein 2), OGG1 (8-oxoguanine DNA glycosylase), STC1 (stanniocalcin 1), CNDP1 (carnosine dipeptidase 1 (metallopeptidase M20 family)), C10orf2 (chromosome 10 open reading frame 2), MAML3 mastermind-like 3 (Drosophila), DKC1 (dyskeratosis congenita 1, dyskerin), PAXIP1 (PAX interacting (with transcription-activation domain) protein 1), CASK (calcium/calmodulin-dependent serine protein kinase (MAGUK family)), MAPT (microtubule-associated protein tau), SP1 (Sp1 transcription factor), POLG (polymerase (DNA directed), gamma), AFF2 (AF4/FMR2 family, member 2), THBS1 (thrombospondin 1), TP53 (tumor protein p53), ESR1 (estrogen receptor 1), CGGBP1 (CGG triplet repeat binding protein 1), ABT1 (activator of basal transcription 1), KLK3 (kallikrein-related peptidase 3), PRNP (prion protein), JUN (jun oncogene), KCNN3 (potassium intermediate/small conductance calcium-activated channel, subfamily N, member 3), BAX (BCL2-associated X protein), FRAXA (fragile site, folic acid type, rare, fra(X)(q27.3) A (macroorchidism, mental retardation)), KBTBD10 (kelch repeat and BTB (POZ) domain containing 10), MBNL1 (muscleblind-like (Drosophila)), RAD51 (RAD51 homolog (RecA homolog, E. coli) (S. cerevisiae)), NCOA3 (nuclear receptor coactivator 3), ERDA1 (expanded repeat domain, CAG/CTG 1), TSC1 (tuberous sclerosis 1), COMP (cartilage oligomeric matrix protein), GCLC (glutamate-cysteine ligase, catalytic subunit), RRAD (Ras-related associated with diabetes), MSH3 (mutS homolog 3 (E. coli)), DRD2 (dopamine receptor D2), CD44 (CD44 molecule (Indian blood group)), CTCF (CCCTC-binding factor (zinc finger protein)), CCND1 (cyclin D1), CLSPN (claspin homolog (Xenopus laevis)), MEF2A (myocyte enhancer factor 2A), PTPRU (protein tyrosine phosphatase, receptor type, U), GAPDH (glyceraldehyde-3-phosphate dehydrogenase), TRIM22 (tripartite motif-containing 22), WT1 (Wilms tumor 1), AHR (aryl hydrocarbon receptor), GPX1 (glutathione peroxidase 1), TPMT (thiopurine S-methyltransferase), NDP (Norrie disease (pseudoglioma)), ARX (aristaless related homeobox), MUS81 (MUS81 endonuclease homolog (S. cerevisiae)), TYR (tyrosinase (oculocutaneous albinism IA)), EGR1 (early growth response 1), UNG (uracil-DNA glycosylase), NUMBL (numb homolog (Drosophila)-like), FABP2 (fatty acid binding protein 2, intestinal), EN2 (engrailed homeobox 2), CRYGC (crystallin, gamma C), SRP14 (signal recognition particle 14 kDa (homologous Alu RNA binding protein)), CRYGB (crystallin, gamma B), PDCD1 (programmed cell death 1), HOXA1 (homeobox A1), ATXN2L (ataxin 2-like), PMS2 (PMS2 postmeiotic segregation increased 2 (S. cerevisiae)), GLA (galactosidase, alpha), CBL (Cas-Br-M (murine) ecotropic retroviral transforming sequence), FTH1 (ferritin, heavy polypeptide 1), IL12RB2 (interleukin 12 receptor, beta 2), OTX2 (orthodenticle homeobox 2), HOXA5 (homeobox A5), POLG2 (polymerase (DNA directed), gamma 2, accessory subunit), DLX2 (distal-less homeobox 2), SIRPA (signal-regulatory protein alpha), OTX1 (orthodenticle homeobox 1), AHRR (aryl-hydrocarbon receptor repressor), MANF (mesencephalic astrocyte-derived neurotrophic factor), TMEM158 (transmembrane protein 158 (gene/pseudogene)), and ENSG00000078687.

[1486] Preferred proteins associated with trinucleotide repeat expansion disorders include HTT (Huntingtin), AR (androgen receptor), FXN (frataxin), Atxn3 (ataxin), Atxn1 (ataxin), Atxn2 (ataxin), Atxn7 (ataxin), Atxn10 (ataxin), DMPK (dystrophia myotonica-protein kinase), Atn1 (atrophin 1), CBP (creb binding protein), VLDLR (very low density lipoprotein receptor), and any combination thereof.

### Treating Hearing Diseases

[1487] The present invention also contemplates delivering the CRISPR-Cas system to one or both ears.

[1488] Researchers are looking into whether gene therapy could be used to aid current deafness treatments—namely, cochlear implants. Deafness is often caused by lost or damaged hair cells that cannot relay signals to auditory neurons. In such cases, cochlear implants may be used to respond to sound and transmit electrical signals to the nerve cells. But these neurons often degenerate and retract from the cochlea as fewer growth factors are released by impaired hair cells.

[1489] US patent application 20120328580 describes injection of a pharmaceutical composition into the ear (e.g., auricular administration), such as into the luminae of the cochlea (e.g., the Scala media, Sc vestibulae, and Sc tympani), e.g., using a syringe, e.g., a single-dose syringe. For example, one or more of the compounds described herein can be administered by intratympanic injection (e.g., into the middle ear), and/or injections into the outer, middle, and/or inner ear. Such methods are routinely used in the art, for example, for the administration of steroids and antibiotics into human ears. Injection can be, for example, through the round window of the ear or through the cochlear capsule. Other inner ear administration methods are known in the art (see, e.g., Salt and Plontke, Drug Discovery Today, 10:1299-1306, 2005).

[1490] In another mode of administration, the pharmaceutical composition can be administered in situ, via a catheter or pump. A catheter or pump can, for example, direct a pharmaceutical composition into the cochlear luminae or the round window of the ear and/or the lumen of the colon. Exemplary drug delivery apparatus and methods suitable for administering one or more of the compounds described herein into an ear, e.g., a human ear, are described by McKenna et al., (U.S. Publication No. 2006/0030837) and Jacobsen et al., (U.S. Pat. No. 7,206,639). In some embodiments, a catheter or pump can be positioned, e.g., in the ear (e.g., the outer, middle, and/or inner ear) of a patient during a surgical procedure. In some embodiments, a catheter or pump can be positioned, e.g., in the ear (e.g., the outer, middle, and/or inner ear) of a patient without the need for a surgical procedure.

[1491] Alternatively or in addition, one or more of the compounds described herein can be administered in combination with a mechanical device such as a cochlear implant or a hearing aid, which is worn in the outer ear. An exemplary cochlear implant that is suitable for use with the present invention is described by Edge et al., (U.S. Publication No. 2007/0093 878).

[1492] In some embodiments, the modes of administration described above may be combined in any order and can be simultaneous or interspersed.

[1493] Alternatively or in addition, the present invention may be administered according to any of the Food and Drug Administration approved methods, for example, as described in CDER Data Standards Manual, version number 004 (which is available at fda.give/cder/dsm/DRG/drg00301.htm).

[1494] In general, the cell therapy methods described in US patent application 20120328580 can be used to promote complete or partial differentiation of a cell to or towards a mature cell type of the inner ear (e.g., a hair cell) in vitro. Cells resulting from such methods can then be transplanted or implanted into a patient in need of such treatment. The cell culture methods required to practice these methods, including methods for identifying and selecting suitable cell types, methods for promoting complete or partial differentiation of selected cells, methods for identifying complete or partially differentiated cell types, and methods for implanting complete or partially differentiated cells are described below.

[1495] Cells suitable for use in the present invention include, but are not limited to, cells that are capable of differentiating completely or partially into a mature cell of the inner ear, e.g., a hair cell (e.g., an inner and/or outer hair cell), when contacted, e.g., in vitro, with one or more of the compounds described herein. Exemplary cells that are capable of differentiating into a hair cell include, but are not limited to stem cells (e.g., inner ear stem cells, adult stem cells, bone marrow derived stem cells, embryonic stem cells, mesenchymal stem cells, skin stem cells, iPS cells, and fat derived stem cells), progenitor cells (e.g., inner ear progenitor cells), support cells (e.g., Deiters' cells, pillar cells, inner phalangeal cells, tectal cells and Hensen's cells), and/or germ cells. The use of stem cells for the replacement of inner ear sensory cells is described in Li et al., (U.S. Publication No. 2005/0287127) and Li et al., (U.S. patent Ser. No. 11/953,797). The use of bone marrow derived stem cells for the replacement of inner ear sensory cells is described in Edge et al., PCT/US2007/084654. iPS cells are described, e.g., at Takahashi et al., Cell, Volume 131, Issue 5, Pages 861-872 (2007); Takahashi and Yamanaka, Cell 126, 663-76 (2006); Okita et al., Nature 448, 260-262 (2007); Yu, J. et al., Science 318(5858):1917-1920 (2007); Nakagawa et al., Nat. Biotechnol. 26:101-106 (2008); and Zaehres and Scholer, Cell 131(5):834-835 (2007). Such suitable cells can be identified by analyzing (e.g., qualitatively or quantitatively) the presence of one or more tissue specific genes. For example, gene expression can be detected by detecting the protein product of one or more tissue-specific genes. Protein detection techniques involve staining proteins (e.g., using cell extracts or whole cells) using antibodies against the appropriate antigen. In this case, the appropriate antigen is the protein product of the tissue-specific gene expression. Although, in principle, a first antibody (i.e., the antibody that binds the antigen) can be labeled, it is more common (and improves the visualization) to use a second antibody directed against the first (e.g., an anti-IgG). This second antibody is conjugated either with fluorochromes, or appropriate enzymes for colorimetric reactions, or gold beads (for electron microscopy), or with the biotin-avidin system, so that the location of the primary antibody, and thus the antigen, can be recognized.

[1496] The CRISPR Cas molecules of the present invention may be delivered to the ear by direct application of pharmaceutical composition to the outer ear, with compositions modified from US Published application, 20110142917. In some embodiments the pharmaceutical composition is applied to the ear canal. Delivery to the ear may also be referred to as aural or otic delivery.

[1497] In some embodiments the RNA molecules of the invention are delivered in liposome or lipofectin formulations and the like and can be prepared by methods well known to those skilled in the art. Such methods are described, for example, in U.S. Pat. Nos. 5,593,972, 5,589,466, and 5,580,859, which are herein incorporated by reference.

[1498] Delivery systems aimed specifically at the enhanced and improved delivery of siRNA into mammalian cells have been developed, (see, for example, Shen et al FEBS Let. 2003, 539:111-114; Xia et al., Nat. Biotech. 2002, 20:1006-1010; Reich et al., Mol. Vision. 2003, 9: 210-216; Sorensen et al., J. Mol. Biol. 2003, 327: 761-766; Lewis et al., Nat. Gen. 2002, 32: 107-108 and Simeoni et al., NAR 2003, 31, 11: 2717-2724) and may be applied to the present invention. siRNA has recently been successfully used for inhibition of gene expression in primates (see for example. Tolentino et al., Retina 24(4):660 which may also be applied to the present invention.

[1499] Qi et al. discloses methods for efficient siRNA transfection to the inner ear through the intact round window by a novel proteidic delivery technology which may be applied to the nucleic acid-targeting system of the present invention (see, e.g., Qi et al., Gene Therapy (2013), 1-9). In particular, a TAT double stranded RNA-binding domains (TAT-DRBDs), which can transfect Cy3-labeled siRNA into cells of the inner ear, including the inner and outer hair cells, Crista ampullaris, macula utriculi and macula sacculi, through intact round-window permeation was successful for delivering double stranded siRNAs in vivo for treating various inner ear ailments and preservation of hearing function. About 40 μl of 10 mM RNA may be contemplated as the dosage for administration to the ear.

[1500] According to Rejali et al. (Hear Res. 2007 June; 228(1-2):180-7), cochlear implant function can be improved by good preservation of the spiral ganglion neurons, which are the target of electrical stimulation by the implant and brain derived neurotrophic factor (BDNF) has previously been shown to enhance spiral ganglion survival in experimentally deafened ears. Rejali et al. tested a modified design of the cochlear implant electrode that includes a coating of fibroblast cells transduced by a viral vector with a BDNF gene insert. To accomplish this type of ex vivo gene transfer, Rejali et al. transduced guinea pig fibroblasts with an adenovirus with a BDNF gene cassette insert, and determined that these cells secreted BDNF and then attached BDNF-secreting cells to the cochlear implant electrode via an agarose gel, and implanted the electrode in the scala tympani. Rejali et al. determined that the BDNF expressing electrodes were able to preserve significantly more spiral ganglion neurons in the basal turns of the cochlea after 48 days of implantation when compared to control electrodes and demonstrated the feasibility of combining cochlear implant therapy with ex vivo gene transfer for enhancing spiral ganglion neuron survival. Such a system may be applied to the nucleic acid-targeting system of the present invention for delivery to the ear.

[1501] Mukherjea et al. (Antioxidants & Redox Signaling, Volume 13, Number 5, 2010) document that knockdown of NOX3 using short interfering (si) RNA abrogated cisplatin ototoxicity, as evidenced by protection of OHCs from damage and reduced threshold shifts in auditory brainstem responses (ABRs). Different doses of siNOX3 (0.3, 0.6, and 0.9 μg) were administered to rats and NOX3 expression was evaluated by real time RT-PCR. The lowest dose of NOX3 siRNA used (0.3 μg) did not show any inhibition of NOX3 mRNA when compared to transtympanic administration of scrambled siRNA or untreated cochleae. However, administration of the higher doses of NOX3 siRNA (0.6 and 0.9 μg) reduced NOX3 expression compared to control scrambled siRNA. Such a system may be applied to the CRISPR Cas system of the present invention for transtympanic administration with a dosage of about 2 mg to about 4 mg of CRISPR Cas for administration to a human. Jung et al. (Molecular Therapy, vol. 21 no. 4, 834-841 April 2013) demonstrate that HesS levels in the utricle decreased after the application of siRNA and that the number of hair cells in these utricles was significantly larger than following control treatment. The data suggest that siRNA technology may be useful for inducing repair and regeneration in the inner ear and that the Notch signaling pathway is a potentially useful target for specific gene expression inhibition. Jung et al. injected 8 μg of HesS siRNA in 2 μl volume, prepared by adding sterile normal saline to the lyophilized siRNA to a vestibular epithelium of the ear. Such a system may be applied to the nucleic acid-targeting system of the present invention for administration to the vestibular epithelium of the ear with a dosage of about 1 to about 30 mg of CRISPR Cas for administration to a human.

### Gene Targeting in Non-Dividing Cells (Neurones & Muscle)

[1502] Non-dividing (especially non-dividing, fully differentiated) cell types present issues for gene targeting or genome engineering, for example because homologous recombination (HR) is generally supressed in the G1 cell-cycle phase. However, while studying the mechanisms by which cells control normal DNA repair systems, Durocher discovered a previously unknown switch that keeps HR “off” in non-dividing cells and devised a strategy to toggle this switch back on. Orthwein et al. (Daniel Durocher's lab at the Mount Sinai Hospital in Ottawa, Canada) recently reported (Nature 16142, published online 9 Dec. 2015) have shown that the suppression of HR can be lifted and gene targeting successfully concluded in both kidney (293T) and osteosarcoma (U2OS) cells. Tumor suppressors, BRCA1, PALB2 and BRAC2 are known to promote DNA DSB repair by HR. They found that formation of a complex of BRCA1 with PALB2-BRAC2 is governed by a ubiquitin site on PALB2, such that action on the site by an E3 ubiquitin ligase. This E3 ubiquitin ligase is composed of KEAPI (a PALB2-interacting protein) in complex with cullin-3 (CUL3)-RBX1. PALB2 ubiquitylation suppresses its interaction with BRCA1 and is counteracted by the deubiquitylase USP 1, which is itself under cell cycle control. Restoration of the BRCA1-PALB2 interaction combined with the activation of DNA-end resection is sufficient to induce homologous recombination in G1, as measured by a number of methods including a CRISPR-Cas9-based gene-targeting assay directed at USP11 or KEAPI (expressed from a pX459 vector). However, when the BRCA1-PALB2 interaction was restored in resection-competent G1 cells using either KEAPI depletion or expression of the PALB2-KR mutant, a robust increase in gene-targeting events was detected.

[1503] Thus, reactivation of HR in cells, especially non-dividing, fully differentiated cell types is preferred, in some embodiments. In some embodiments, promotion of the BRCA1-PALB2 interaction is preferred in some embodiments. In some embodiments, the target cell is a non-dividing cell. In some embodiments, the target cell is a neurone or muscle cell. In some embodiments, the target cell is targeted in vivo. In some embodiments, the cell is in G1 and HR is supressed. In some embodiments, use of KEAPI depletion, for example inhibition of expression of KEAPI activity, is preferred. KEAPI depletion may be achieved through siRNA, for example as shown in Orthwein et al. Alternatively, expression of the PALB2-KR mutant (lacking all eight Lys residues in the BRCA1-interaction domain is preferred, either in combination with KEAPI depletion or alone. PALB2-KR interacts with BRCA1 irrespective of cell cycle position. Thus, promotion or restoration of the BRCA1-PALB2 interaction, especially in G1 cells, is preferred in some embodiments, especially where the target cells are non-dividing, or where removal and return (ex vivo gene targeting) is problematic, for example neurone or muscle cells. KEAPI siRNA is available from ThermoFischer. In some embodiments, a BRCA1-PALB2 complex may be delivered to the G1 cell. In some embodiments, PALB2 deubiquitylation may be promoted for example by increased expression of the deubiquitylase USP 11, so it is envisaged that a construct may be provided to promote or up-regulate expression or activity of the deubiquitylase USP 11.

### Treating Diseases of the Eye

[1504] The present invention also contemplates delivering the CRISPR-Cas system to one or both eyes.

[1505] In particular embodiments of the invention, the CRISPR-Cas system may be used to correct ocular defects that arise from several genetic mutations further described in Genetic Diseases of the Eye, Second Edition, edited by Elias I. Traboulsi, Oxford University Press, 2012.

[1506] In some embodiments, the condition to be treated or targeted is an eye disorder. In some embodiments, the eye disorder may include glaucoma. In some embodiments, the eye disorder includes a retinal degenerative disease. In some embodiments, the retinal degenerative disease is selected from Stargardt disease, Bardet-Biedl Syndrome, Best disease, Blue Cone Monochromacy, Choroidermia, Cone-rod dystrophy, Congenital Stationary Night Blindness, Enhanced S-Cone Syndrome, Juvenile X-Linked Retinoschisis, Leber Congenital Amaurosis, Malattia Leventinesse, Norrie Disease or X-linked Familial Exudative Vitreoretinopathy, Pattern Dystrophy, Sorsby Dystrophy, Usher Syndrome, Retinitis Pigmentosa, Achromatopsia or Macular dystrophies or degeneration, Retinitis Pigmentosa, Achromatopsia, and age related macular degeneration. In some embodiments, the retinal degenerative disease is Leber Congenital Amaurosis (LCA) or Retinitis Pigmentosa. In some embodiments, the CRISPR system is delivered to the eye, optionally via intravitreal injection or subretinal injection.

[1507] For administration to the eye, lentiviral vectors, in particular equine infectious anemia viruses (EIAV) are particularly preferred.

[1508] In another embodiment, minimal non-primate lentiviral vectors based on the equine infectious anemia virus (EIAV) are also contemplated, especially for ocular gene therapy (see, e.g., Balagaan, J Gene Med 2006; 8: 275-285, Published online 21 Nov. 2005 in Wiley InterScience (www.interscience.wiley.com). DOI: 10.1002/jgm.845). The vectors are contemplated to have cytomegalovirus (CMV) promoter driving expression of the target gene. Intracameral, subretinal, intraocular and intravitreal injections are all contemplated (see, e.g., Balagaan, J Gene Med 2006; 8: 275-285, Published online 21 Nov. 2005 in Wiley InterScience (www.interscience.wiley.com). DOI: 10.1002/jgm.845). Intraocular injections may be performed with the aid of an operating microscope. For subretinal and intravitreal injections, eyes may be prolapsed by gentle digital pressure and fundi visualised using a contact lens system consisting of a drop of a coupling medium solution on the cornea covered with a glass microscope slide coverslip. For subretinal injections, the tip of a 10-mm 34-gauge needle, mounted on a 5-μl Hamilton syringe may be advanced under direct visualisation through the superior equatorial sclera tangentially towards the posterior pole until the aperture of the needle was visible in the subretinal space. Then, 2 μl of vector suspension may be injected to produce a superior bullous retinal detachment, thus confirming subretinal vector administration. This approach creates a self-sealing sclerotomy allowing the vector suspension to be retained in the subretinal space until it is absorbed by the RPE, usually within 48 h of the procedure. This procedure may be repeated in the inferior hemisphere to produce an inferior retinal detachment. This technique results in the exposure of approximately 70% of neurosensory retina and RPE to the vector suspension. For intravitreal injections, the needle tip may be advanced through the sclera 1 mm posterior to the corneoscleral limbus and 2 μl of vector suspension injected into the vitreous cavity. For intracameral injections, the needle tip may be advanced through a corneoscleral limbal paracentesis, directed towards the central cornea, and 2 μl of vector suspension may be injected. For intracameral injections, the needle tip may be advanced through a corneoscleral limbal paracentesis, directed towards the central cornea, and 2 μl of vector suspension may be injected. These vectors may be injected at titres of either 1.0-1.4×1010 or 1.0-1.4×109 transducing units (TU)/ml.

[1509] In another embodiment, RetinoStat®, an equine infectious anemia virus-based lentiviral gene therapy vector that expresses angiostatic proteins endostain and angiostatin that is delivered via a subretinal injection for the treatment of the web form of age-related macular degeneration is also contemplated (see, e.g., Binley et al., HUMAN GENE THERAPY 23:980-991 (September 2012)). Such a vector may be modified for the CRISPR-Cas system of the present invention. Each eye may be treated with either RetinoStat® at a dose of 1.1×10⁵ transducing units per eye (TU/eye) in a total volume of 100 μl.

[1510] In another embodiment, an E1-, partial E3-, E4-deleted adenoviral vector may be contemplated for delivery to the eye. Twenty-eight patients with advanced neovascular agerelated macular degeneration (AMD) were given a single intravitreous injection of an E1-, partial E3-, E4-deleted adenoviral vector expressing human pigment ep-ithelium-derived factor (AdPEDF.11) (see, e.g., Campochiaro et al., Human Gene Therapy 17:167-176 (February 2006)). Doses ranging from 106 to 109.5 particle units (PU) were investigated and there were no serious adverse events related to AdPEDF.11 and no dose-limiting toxicities (see, e.g., Campochiaro et al., Human Gene Therapy 17:167-176 (February 2006)). Adenoviral vectormediated ocular gene transfer appears to be a viable approach for the treatment of ocular disorders and could be applied to the CRISPR Cas system.

[1511] In another embodiment, the sd-rxRNA® system of R×i Pharmaceuticals may be used/and or adapted for delivering CRISPR Cas to the eye. In this system, a single intravitreal administration of 3 μg of sd-rxRNA results in sequence-specific reduction of PPIB mRNA levels for 14 days. The the sd-rxRNA® system may be applied to the nucleic acid-targeting system of the present invention, contemplating a dose of about 3 to 20 mg of CRISPR administered to a human.

[1512] Millington-Ward et al. (Molecular Therapy, vol. 19 no. 4, 642-649 April 2011) describes adeno-associated virus (AAV) vectors to deliver an RNA interference (RNAi)-based rhodopsin suppressor and a codon-modified rhodopsin replacement gene resistant to suppression due to nucleotide alterations at degenerate positions over the RNAi target site. An injection of either 6.0×108 vp or 1.8×1010 vp AAV were subretinally injected into the eyes by Millington-Ward et al. The AAV vectors of Millington-Ward et al. may be applied to the CRISPR Cas system of the present invention, contemplating a dose of about 2×1011 to about 6×1013 vp administered to a human.

[1513] Dalkara et al. (Sci Transl Med 5, 189ra76 (2013)) also relates to in vivo directed evolution to fashion an AAV vector that delivers wild-type versions of defective genes throughout the retina after noninjurious injection into the eyes' vitreous humor. Dalkara describes a a 7mer peptide display library and an AAV library constructed by DNA shuffling of cap genes from AAV1, 2, 4, 5, 6, 8, and 9. The rcAAV libraries and rAAV vectors expressing GFP under a CAG or Rho promoter were packaged and and deoxyribonuclease-resistant genomic titers were obtained through quantitative PCR. The libraries were pooled, and two rounds of evolution were performed, each consisting of initial library diversification followed by three in vivo selection steps. In each such step, P30 rho-GFP mice were intravitreally injected with 2 ml of iodixanol-purified, phosphate-buffered saline (PBS)-dialyzed library with a genomic titer of about 1×1012 vg/ml. The AAV vectors of Dalkara et al. may be applied to the nucleic acid-targeting system of the present invention, contemplating a dose of about 1×10¹⁵ to about 1×10¹⁶ vg/ml administered to a human.

[1514] In a particular embodiment, the rhodopsin gene may be targeted for the treatment of retinitis pigmentosa (RP), wherein the system of US Patent Publication No. 20120204282 assigned to Sangamo BioSciences, Inc. may be modified in accordance of the CRISPR Cas system of the present invention.

[1515] In another embodiment, the methods of US Patent Publication No. 20130183282 assigned to Cellectis, which is directed to methods of cleaving a target sequence from the human rhodopsin gene, may also be modified to the nucleic acid-targeting system of the present invention.

[1516] US Patent Publication No. 20130202678 assigned to Academia Sinica relates to methods for treating retinopathies and sight-threatening ophthalmologic disorders relating to delivering of the Puf-A gene (which is expressed in retinal ganglion and pigmented cells of eye tissues and displays a unique anti-apoptotic activity) to the sub-retinal or intravitreal space in the eye. In particular, desirable targets are zgc:193933, prdm1a, spata2, tex10, rbb4, ddx3, zp2.2, Blimp-1 and HtrA2, all of which may be targeted by the nucleic acid-targeting system of the present invention.

[1517] Wu (Cell Stem Cell, 13:659-62, 2013) designed a guide RNA that led Cas9 to a single base pair mutation that causes cataracts in mice, where it induced DNA cleavage. Then using either the other wild-type allele or oligos given to the zygotes repair mechanisms corrected the sequence of the broken allele and corrected the cataract-causing genetic defect in mutant mouse.

[1518] US Patent Publication No. 20120159653, describes use of zinc finger nucleases to genetically modify cells, animals and proteins associated with macular degeration (MD). Macular degeneration (MD) is the primary cause of visual impairment in the elderly, but is also a hallmark symptom of childhood diseases such as Stargardt disease, Sorsby fundus, and fatal childhood neurodegenerative diseases, with an age of onset as young as infancy. Macular degeneration results in a loss of vision in the center of the visual field (the macula) because of damage to the retina. Currently existing animal models do not recapitulate major hallmarks of the disease as it is observed in humans. The available animal models comprising mutant genes encoding proteins associated with MD also produce highly variable phenotypes, making translations to human disease and therapy development problematic.

[1519] One aspect of US Patent Publication No. 20120159653 relates to editing of any chromosomal sequences that encode proteins associated with MD which may be applied to the nucleic acid-targeting system of the present invention. The proteins associated with MD are typically selected based on an experimental association of the protein associated with MD to an MD disorder. For example, the production rate or circulating concentration of a protein associated with MD may be elevated or depressed in a population having an MD disorder relative to a population lacking the MD disorder. Differences in protein levels may be assessed using proteomic techniques including but not limited to Western blot, immunohistochemical staining, enzyme linked immunosorbent assay (ELISA), and mass spectrometry. Alternatively, the proteins associated with MD may be identified by obtaining gene expression profiles of the genes encoding the proteins using genomic techniques including but not limited to DNA microarray analysis, serial analysis of gene expression (SAGE), and quantitative real-time polymerase chain reaction (Q-PCR).

[1520] By way of non-limiting example, proteins associated with MD include but are not limited to the following proteins: (ABCA4) ATP-binding cassette, sub-family A (ABC1), member 4 ACHM1 achromatopsia (rod monochromacy) 1 ApoE Apolipoprotein E (ApoE) C1QTNF5 (CTRP5) Clq and tumor necrosis factor related protein 5 (C1QTNF5) C2 Complement component 2 (C2) C3 Complement components (C3) CCL2 Chemokine (C-C motif) Ligand 2 (CCL2) CCR2 Chemokine (C-C motif) receptor 2 (CCR2) CD36 Cluster of Differentiation 36 CFB Complement factor B CFH Complement factor CFH H CFHR1 complement factor H-related 1 CFHR3 complement factor H-related 3 CNGB3 cyclic nucleotide gated channel beta 3 CP ceruloplasmin (CP) CRP C reactive protein (CRP) CST3 cystatin C or cystatin 3 (CST3) CTSD Cathepsin D (CTSD) CX3CR1 chemokine (C-X3-C motif) receptor 1 ELOVL4 Elongation of very long chain fatty acids 4 ERCC6 excision repair crosscomplementing rodent repair deficiency, complementation group 6 FBLN5 Fibulin-5 FBLN5 Fibulin 5 FBLN6 Fibulin 6 FSCN2 fascin (FSCN2) HMCN1 Hemicentrin 1 HMCN1 hemicentin 1 HTRA1 HtrA serine peptidase 1 (HTRA1) HTRA1 HtrA serine peptidase 1 IL-6 Interleukin 6 IL-8 Interleukin 8 LOC387715 Hypothetical protein PLEKHA1 Pleckstrin homology domaincontaining family A member 1 (PLEKHA1) PROM1 Prominin 1(PROM1 or CD133) PRPH2 Peripherin-2 RPGR retinitis pigmentosa GTPase regulator SERPING1 serpin peptidase inhibitor, clade G, member 1 (C1-inhibitor) TCOF1 Treacle TIMP3 Metalloproteinase inhibitor 3 (TIMP3) TLR3 Toll-like receptor 3.

[1521] The identity of the protein associated with MD whose chromosomal sequence is edited can and will vary. In preferred embodiments, the proteins associated with MD whose chromosomal sequence is edited may be the ATP-binding cassette, sub-family A (ABC1) member 4 protein (ABCA4) encoded by the ABCR gene, the apolipoprotein E protein (APOE) encoded by the APOE gene, the chemokine (C-C motif) Ligand 2 protein (CCL2) encoded by the CCL2 gene, the chemokine (C-C motif) receptor 2 protein (CCR2) encoded by the CCR2 gene, the ceruloplasmin protein (CP) encoded by the CP gene, the cathepsin D protein (CTSD) encoded by the CTSD gene, or the metalloproteinase inhibitor 3 protein (TIMP3) encoded by the TIMP3 gene. In an exemplary embodiment, the genetically modified animal is a rat, and the edited chromosomal sequence encoding the protein associated with MD may be: (ABCA4) ATPbinding cassette, NM_000350 sub-family A (ABC1), member 4 APOE Apolipoprotein E NM_138828 (APOE) CCL2 Chemokine (C-C NM_031530 motif) Ligand 2 (CCL2) CCR2 Chemokine (C-C NM_021866 motif) receptor 2 (CCR2) CP ceruloplasmin (CP) NM_012532 CTSD Cathepsin D (CTSD) NM_134334 TIMP3 Metalloproteinase NM_012886 inhibitor 3 (TIMP3) The animal or cell may comprise 1, 2, 3, 4, 5, 6, 7 or more disrupted chromosomal sequences encoding a protein associated with MD and zero, 1, 2, 3, 4, 5, 6, 7 or more chromosomally integrated sequences encoding the disrupted protein associated with MD.

[1522] The edited or integrated chromosomal sequence may be modified to encode an altered protein associated with MD. Several mutations in MD-related chromosomal sequences have been associated with MD. Non-limiting examples of mutations in chromosomal sequences associated with MD include those that may cause MD including in the ABCR protein, E471K (i.e. glutamate at position 471 is changed to lysine), R1129L (i.e. arginine at position 1129 is changed to leucine), T1428M (i.e. threonine at position 1428 is changed to methionine), R1517S (i.e. arginine at position 1517 is changed to serine), 11562T (i.e. isoleucine at position 1562 is changed to threonine), and G1578R (i.e. glycine at position 1578 is changed to arginine); in the CCR2 protein, V641 (i.e. valine at position 192 is changed to isoleucine); in CP protein, G969B (i.e. glycine at position 969 is changed to asparagine or aspartate); in TIMP3 protein, S156C (i.e. serine at position 156 is changed to cysteine), G166C (i.e. glycine at position 166 is changed to cysteine), G167C (i.e. glycine at position 167 is changed to cysteine), Y168C (i.e. tyrosine at position 168 is changed to cysteine), S170C (i.e. serine at position 170 is changed to cysteine), Y172C (i.e. tyrosine at position 172 is changed to cysteine) and S181C (i.e. serine at position 181 is changed to cysteine). Other associations of genetic variants in MD-associated genes and disease are known in the art.

[1523] CRISPR systems are useful to correct diseases resulting from autosomal dominant genes. For example, CRISPR/Cas9 was used to remove an autosomal dominant gene that causes receptor loss in the eye. Bakondi, B. et al., In Vivo CRISPR Cas9 Gene Editing Corrects Retinal Dystrophy in the S334ter-3 Rat Model of Autosomal Dominant Retinitis Pigmentosa. Molecular Therapy, 2015; DOI: 10.1038/mt.2015.220.

### Treating Circulatory and Muscular Diseases

[1524] The present invention also contemplates delivering the CRISPR-Cas system described herein, e.g. Cpf1 effector protein systems, to the heart. For the heart, a myocardium tropic adena-associated virus (AAVM) is preferred, in particular AAVM41 which showed preferential gene transfer in the heart (see, e.g., Lin-Yanga et al., PNAS, Mar. 10, 2009, vol. 106, no. 10). Administration may be systemic or local. A dosage of about 1-10×10¹⁴ vector genomes are contemplated for systemic administration. See also, e.g., Eulalio et al. (2012) Nature 492: 376 and Somasuntharam et al. (2013) Biomaterials 34: 7790.

[1525] For example, US Patent Publication No. 20110023139, describes use of zinc finger nucleases to genetically modify cells, animals and proteins associated with cardiovascular disease. Cardiovascular diseases generally include high blood pressure, heart attacks, heart failure, and stroke and TIA. Any chromosomal sequence involved in cardiovascular disease or the protein encoded by any chromosomal sequence involved in cardiovascular disease may be utilized in the methods described in this disclosure. The cardiovascular-related proteins are typically selected based on an experimental association of the cardiovascular-related protein to the development of cardiovascular disease. For example, the production rate or circulating concentration of a cardiovascular-related protein may be elevated or depressed in a population having a cardiovascular disorder relative to a population lacking the cardiovascular disorder. Differences in protein levels may be assessed using proteomic techniques including but not limited to Western blot, immunohistochemical staining, enzyme linked immunosorbent assay (ELISA), and mass spectrometry. Alternatively, the cardiovascular-related proteins may be identified by obtaining gene expression profiles of the genes encoding the proteins using genomic techniques including but not limited to DNA microarray analysis, serial analysis of gene expression (SAGE), and quantitative real-time polymerase chain reaction (Q-PCR).

[1526] By way of example, the chromosomal sequence may comprise, but is not limited to, IL1B (interleukin 1, beta), XDH (xanthine dehydrogenase), TP53 (tumor protein p53), PTGIS (prostaglandin 12 (prostacyclin) synthase), MB (myoglobin), IL4 (interleukin 4), ANGPT1 (angiopoietin 1), ABCG8 (ATP-binding cassette, sub-family G (WHITE), member 8), CTSK (cathepsin K), PTGIR (prostaglandin 12 (prostacyclin) receptor (IP)), KCNJ11 (potassium inwardly-rectifying channel, subfamily J, member 11), INS (insulin), CRP (C-reactive protein, pentraxin-related), PDGFRB (platelet-derived growth factor receptor, beta polypeptide), CCNA2 (cyclin A2), PDGFB (platelet-derived growth factor beta polypeptide (simian sarcoma viral (v-sis) oncogene homolog)), KCNJ5 (potassium inwardly-rectifying channel, subfamily J, member 5), KCNN3 (potassium intermediate/small conductance calcium-activated channel, subfamily N, member 3), CAPN10 (calpain 10), PTGES (prostaglandin E synthase), ADRA2B (adrenergic, alpha-2B-, receptor), ABCG5 (ATP-binding cassette, sub-family G (WHITE), member 5), PRDX2 (peroxiredoxin 2), CAPN5 (calpain 5), PARP14 (poly (ADP-ribose) polymerase family, member 14), MEX3C (mex-3 homolog C (C. elegans)), ACE angiotensin I converting enzyme (peptidyl-dipeptidase A) 1), TNF (tumor necrosis factor (TNF superfamily, member 2)), IL6 (interleukin 6 (interferon, beta 2)), STN (statin), SERPINE1 (serpin peptidase inhibitor, clade E (nexin, plasminogen activator inhibitor type 1), member 1), ALB (albumin), ADIPOQ (adiponectin, C1Q and collagen domain containing), APOB (apolipoprotein B (including Ag(x) antigen)), APOE (apolipoprotein E), LEP (leptin), MTHFR (5,10-methylenetetrahydrofolate reductase (NADPH)), APOA1 (apolipoprotein A-I), EDN1 (endothelin 1), NPPB (natriuretic peptide precursor B), NOS3 (nitric oxide synthase 3 (endothelial cell)), PPARG (peroxisome proliferator-activated receptor gamma), PLAT (plasminogen activator, tissue), PTGS2 (prostaglandin-endoperoxide synthase 2 (prostaglandin G/H synthase and cyclooxygenase)), CETP (cholesteryl ester transfer protein, plasma), AGTR1 (angiotensin II receptor, type 1), HMGCR (3-hydroxy-3-methylglutaryl-Coenzyme A reductase), IGF1 (insulin-like growth factor 1 (somatomedin C)), SELE (selectin E), REN (renin), PPARA (peroxisome proliferator-activated receptor alpha), PON1 (paraoxonase 1), KNG1 (kininogen 1), CCL2 (chemokine (C-C motif) ligand 2), LPL (lipoprotein lipase), VWF (von Willebrand factor), F2 (coagulation factor II (thrombin)), ICAM1 (intercellular adhesion molecule 1), TGFB1 (transforming growth factor, beta 1), NPPA (natriuretic peptide precursor A), IL10 (interleukin 10), EPO (erythropoietin), SOD1 (superoxide dismutase 1, soluble), VCAM1 (vascular cell adhesion molecule 1), IFNG (interferon, gamma), LPA (lipoprotein, Lp(a)), MPO (myeloperoxidase), ESR1 (estrogen receptor 1), MAPK1 (mitogen-activated protein kinase 1), HP (haptoglobin), F3 (coagulation factor III (thromboplastin, tissue factor)), CST3 (cystatin C), COG2 (component of oligomeric golgi complex 2), MMP9 (matrix metallopeptidase 9 (gelatinase B, 92 kDa gelatinase, 92 kDa type IV collagenase)), SERPINC1 (serpin peptidase inhibitor, clade C (antithrombin), member 1), F8 (coagulation factor VIII, procoagulant component), HMOX1 (heme oxygenase (decycling) 1), APOC3 (apolipoprotein C-III), IL8 (interleukin 8), PROK1 (prokineticin 1), CBS (cystathionine-beta-synthase), NOS2 (nitric oxide synthase 2, inducible), TLR4 (toll-like receptor 4), SELP (selectin P (granule membrane protein 140 kDa, antigen CD62)), ABCA1 (ATP-binding cassette, sub-family A (ABC1), member 1), AGT (angiotensinogen (serpin peptidase inhibitor, clade A, member 8)), LDLR (low density lipoprotein receptor), GPT (glutamic-pyruvate transaminase (alanine aminotransferase)), VEGFA (vascular endothelial growth factor A), NR3C2 (nuclear receptor subfamily 3, group C, member 2), IL18 (interleukin 18 (interferon-gamma-inducing factor)), NOS1 (nitric oxide synthase 1 (neuronal)), NR3C1 (nuclear receptor subfamily 3, group C, member 1 (glucocorticoid receptor)), FGB (fibrinogen beta chain), HGF (hepatocyte growth factor (hepapoietin A; scatter factor)), IL1A (interleukin 1, alpha), RETN (resistin), AKT1 (v-akt murine thymoma viral oncogene homolog 1), LIPC (lipase, hepatic), HSPD1 (heat shock 60 kDa protein 1 (chaperonin)), MAPK14 (mitogen-activated protein kinase 14), SPP1 (secreted phosphoprotein 1), ITGB3 (integrin, beta 3 (platelet glycoprotein 111a, antigen CD61)), CAT (catalase), UTS2 (urotensin 2), THBD (thrombomodulin), F10 (coagulation factor X), CP (ceruloplasmin (ferroxidase)), TNFRSF 11B (tumor necrosis factor receptor superfamily, member 11b), EDNRA (endothelin receptor type A), EGFR (epidermal growth factor receptor (erythroblastic leukemia viral (v-erb-b) oncogene homolog, avian)), MMP2 (matrix metallopeptidase 2 (gelatinase A, 72 kDa gelatinase, 72 kDa type IV collagenase)), PLG (plasminogen), NPY (neuropeptide Y), RHOD (ras homolog gene family, member D), MAPK8 (mitogen-activated protein kinase 8), MYC (v-myc myelocytomatosis viral oncogene homolog (avian)), FN1 (fibronectin 1), CMA1 (chymase 1, mast cell), PLAU (plasminogen activator, urokinase), GNB3 (guanine nucleotide binding protein (G protein), beta polypeptide 3), ADRB2 (adrenergic, beta-2-, receptor, surface), APOA5 (apolipoprotein A-V), SOD2 (superoxide dismutase 2, mitochondrial), F5 (coagulation factor V (proaccelerin, labile factor)), VDR (vitamin D (1,25-dihydroxyvitamin D3) receptor), ALOX5 (arachidonate 5-lipoxygenase), HLA-DRB1 (major histocompatibility complex, class II, DR beta 1), PARP1 (poly (ADP-ribose) polymerase 1), CD40LG (CD40 ligand), PON2 (paraoxonase 2), AGER (advanced glycosylation end product-specific receptor), IRS1 (insulin receptor substrate 1), PTGS1 (prostaglandin-endoperoxide synthase 1 (prostaglandin G/H synthase and cyclooxygenase)), ECE1 (endothelin converting enzyme 1), F7 (coagulation factor VII (serum prothrombin conversion accelerator)), URN (interleukin 1 receptor antagonist), EPHX2 (epoxide hydrolase 2, cytoplasmic), IGFBP1 (insulin-like growth factor binding protein 1), MAPK10 (mitogen-activated protein kinase 10), FAS (Fas (TNF receptor superfamily, member 6)), ABCB1 (ATP-binding cassette, sub-family B (MDR/TAP), member 1), JUN (jun oncogene), IGFBP3 (insulin-like growth factor binding protein 3), CD14 (CD14 molecule), PDE5A (phosphodiesterase 5A, cGMP-specific), AGTR2 (angiotensin II receptor, type 2), CD40 (CD40 molecule, TNF receptor superfamily member 5), LCAT (lecithin-cholesterol acyltransferase), CCR5 (chemokine (C-C motif) receptor 5), MMP1 (matrix metallopeptidase 1 (interstitial collagenase)), TIMP1 (TIMP metallopeptidase inhibitor 1), ADM (adrenomedullin), DYT10 (dystonia 10), STAT3 (signal transducer and activator of transcription 3 (acute-phase response factor)), MMP3 (matrix metallopeptidase 3 (stromelysin 1, progelatinase)), ELN (elastin), USF 1 (upstream transcription factor 1), CFH (complement factor H), HSPA4 (heat shock 70 kDa protein 4), MMP12 (matrix metallopeptidase 12 (macrophage elastase)), MME (membrane metallo-endopeptidase), F2R (coagulation factor II (thrombin) receptor), SELL (selectin L), CTSB (cathepsin B), ANXA5 (annexin A5), ADRB1 (adrenergic, beta-1-, receptor), CYBA (cytochrome b-245, alpha polypeptide), FGA (fibrinogen alpha chain), GGT1 (gamma-glutamyltransferase 1), LIPG (lipase, endothelial), HIF1A (hypoxia inducible factor 1, alpha subunit (basic helix-loop-helix transcription factor)), CXCR4 (chemokine (C-X-C motif) receptor 4), PROC (protein C (inactivator of coagulation factors Va and VIIIa)), SCARB 1 (scavenger receptor class B, member 1), CD79A (CD79a molecule, immunoglobulin-associated alpha), PLTP (phospholipid transfer protein), ADDI (adducin 1 (alpha)), FGG (fibrinogen gamma chain), SAA1 (serum amyloid A1), KCNH2 (potassium voltage-gated channel, subfamily H (eag-related), member 2), DPP4 (dipeptidyl-peptidase 4), G6PD (glucose-6-phosphate dehydrogenase), NPR1 (natriuretic peptide receptor A/guanylate cyclase A (atrionatriuretic peptide receptor A)), VTN (vitronectin), KIAA0101 (KIAA0101), FOS (FBJ murine osteosarcoma viral oncogene homolog), TLR2 (toll-like receptor 2), PPIG (peptidylprolyl isomerase G (cyclophilin G)), IL1R1 (interleukin 1 receptor, type I), AR (androgen receptor), CYP1A1 (cytochrome P450, family 1, subfamily A, polypeptide 1), SERPINA1 (serpin peptidase inhibitor, clade A (alpha-1 antiproteinase, antitrypsin), member 1), MTR (5-methyltetrahydrofolate-homocysteine methyltransferase), RBP4 (retinol binding protein 4, plasma), APOA4 (apolipoprotein A-IV), CDKN2A (cyclin-dependent kinase inhibitor 2A (melanoma, p16, inhibits CDK4)), FGF2 (fibroblast growth factor 2 (basic)), EDNRB (endothelin receptor type B), ITGA2 (integrin, alpha 2 (CD49B, alpha 2 subunit of VLA-2 receptor)), CABINi (calcineurin binding protein 1), SHBG (sex hormone-binding globulin), HMGB1 (high-mobility group box 1), HSP90B2P (heat shock protein 90 kDa beta (Grp94), member 2 (pseudogene)), CYP3A4 (cytochrome P450, family 3, subfamily A, polypeptide 4), GJA1 (gap junction protein, alpha 1, 43 kDa), CAV1 (caveolin 1, caveolae protein, 22 kDa), ESR2 (estrogen receptor 2 (ER beta)), LTA (lymphotoxin alpha (TNF superfamily, member 1)), GDF15 (growth differentiation factor 15), BDNF (brain-derived neurotrophic factor), CYP2D6 (cytochrome P450, family 2, subfamily D, polypeptide 6), NGF (nerve growth factor (beta polypeptide)), SP1 (Sp1 transcription factor), TGIF1 (TGFB-induced factor homeobox 1), SRC (v-src sarcoma (Schmidt-Ruppin A-2) viral oncogene homolog (avian)), EGF (epidermal growth factor (beta-urogastrone)), PIK3CG (phosphoinositide-3-kinase, catalytic, gamma polypeptide), HLA-A (major histocompatibility complex, class I, A), KCNQ1 (potassium voltage-gated channel, KQT-like subfamily, member 1), CNR1 (cannabinoid receptor 1 (brain)), FBN1 (fibrillin 1), CHKA (choline kinase alpha), BEST1 (bestrophin 1), APP (amyloid beta (A4) precursor protein), CTNNB1 (catenin (cadherin-associated protein), beta 1, 88 kDa), IL2 (interleukin 2), CD36 (CD36 molecule (thrombospondin receptor)), PRKAB1 (protein kinase, AMP-activated, beta 1 non-catalytic subunit), TPO (thyroid peroxidase), ALDH7A1 (aldehyde dehydrogenase 7 family, member A1), CX3CR1 (chemokine (C-X3-C motif) receptor 1), TH (tyrosine hydroxylase), F9 (coagulation factor IX), GH1 (growth hormone 1), TF (transferrin), HFE (hemochromatosis), IL17A (interleukin 17A), PTEN (phosphatase and tensin homolog), GSTM1 (glutathione S-transferase mu 1), DMD (dystrophin), GATA4 (GATA binding protein 4), F13A1 (coagulation factor XIII, A1 polypeptide), TTR (transthyretin), FABP4 (fatty acid binding protein 4, adipocyte), PON3 (paraoxonase 3), APOC1 (apolipoprotein C-I), INSR (insulin receptor), TNFRSF 1B (tumor necrosis factor receptor superfamily, member 1B), HTR2A (5-hydroxytryptamine (serotonin) receptor 2A), CSF3 (colony stimulating factor 3 (granulocyte)), CYP2C9 (cytochrome P450, family 2, subfamily C, polypeptide 9), TXN (thioredoxin), CYP11B2 (cytochrome P450, family 11, subfamily B, polypeptide 2), PTH (parathyroid hormone), CSF2 (colony stimulating factor 2 (granulocyte-macrophage)), KDR (kinase insert domain receptor (a type III receptor tyrosine kinase)), PLA2G2A (phospholipase A2, group IIA (platelets, synovial fluid)), B2M (beta-2-microglobulin), THBS1 (thrombospondin 1), GCG (glucagon), RHOA (ras homolog gene family, member A), ALDH2 (aldehyde dehydrogenase 2 family (mitochondrial)), TCF7L2 (transcription factor 7-like 2 (T-cell specific, HMG-box)), BDKRB2 (bradykinin receptor B2), NFE2L2 (nuclear factor (erythroid-derived 2)-like 2), NOTCH1 (Notch homolog 1, translocation-associated (Drosophila)), UGT1A1 (UDP glucuronosyltransferase 1 family, polypeptide A1), IFNA1 (interferon, alpha 1), PPARD (peroxisome proliferator-activated receptor delta), SIRT1 (sirtuin (silent mating type information regulation 2 homolog) 1 (S. cerevisiae)), GNRH1 (gonadotropin-releasing hormone 1 (luteinizing-releasing hormone)), PAPPA (pregnancy-associated plasma protein A, pappalysin 1), ARR3 (arrestin 3, retinal (X-arrestin)), NPPC (natriuretic peptide precursor C), AHSP (alpha hemoglobin stabilizing protein), PTK2 (PTK2 protein tyrosine kinase 2), IL13 (interleukin 13), MTOR (mechanistic target of rapamycin (serine/threonine kinase)), ITGB2 (integrin, beta 2 (complement component 3 receptor 3 and 4 subunit)), GSTT1 (glutathione S-transferase theta 1), IL6ST (interleukin 6 signal transducer (gp130, oncostatin M receptor)), CPB2 (carboxypeptidase B2 (plasma)), CYP1A2 (cytochrome P450, family 1, subfamily A, polypeptide 2), HNF4A (hepatocyte nuclear factor 4, alpha), SLC6A4 (solute carrier family 6 (neurotransmitter transporter, serotonin), member 4), PLA2G6 (phospholipase A2, group VI (cytosolic, calcium-independent)), TNFSF11 (tumor necrosis factor (ligand) superfamily, member 11), SLC8A1 (solute carrier family 8 (sodium/calcium exchanger), member 1), F2RL1 (coagulation factor II (thrombin) receptor-like 1), AKR1A1 (aldo-keto reductase family 1, member A1 (aldehyde reductase)), ALDH9A1 (aldehyde dehydrogenase 9 family, member A1), BGLAP (bone gamma-carboxyglutamate (gla) protein), MTTP (microsomal triglyceride transfer protein), MTRR (5-methyltetrahydrofolate-homocysteine methyltransferase reductase), SULT1A3 (sulfotransferase family, cytosolic, 1A, phenol-preferring, member 3), RAGE (renal tumor antigen), C4B (complement component 4B (Chido blood group), P2RY12 (purinergic receptor P2Y, G-protein coupled, 12), RNLS (renalase, FAD-dependent amine oxidase), CREB1 (cAMP responsive element binding protein 1), POMC (proopiomelanocortin), RAC1 (ras-related C3 botulinum toxin substrate 1 (rho family, small GTP binding protein Rac1)), LMNA (lamin NC), CD59 (CD59 molecule, complement regulatory protein), SCN5A (sodium channel, voltage-gated, type V, alpha subunit), CYP1B1 (cytochrome P450, family 1, subfamily B, polypeptide 1), MIF (macrophage migration inhibitory factor (glycosylation-inhibiting factor)), MMP13 (matrix metallopeptidase 13 (collagenase 3)), TIMP2 (TIMP metallopeptidase inhibitor 2), CYP19A1 (cytochrome P450, family 19, subfamily A, polypeptide 1), CYP21A2 (cytochrome P450, family 21, subfamily A, polypeptide 2), PTPN22 (protein tyrosine phosphatase, non-receptor type 22 (lymphoid)), MYH14 (myosin, heavy chain 14, non-muscle), MBL2 (mannose-binding lectin (protein C) 2, soluble (opsonic defect)), SELPLG (selectin P ligand), AOC3 (amine oxidase, copper containing 3 (vascular adhesion protein 1)), CTSL1 (cathepsin L1), PCNA (proliferating cell nuclear antigen), IGF2 (insulin-like growth factor 2 (somatomedin A)), ITGB1 (integrin, beta 1 (fibronectin receptor, beta polypeptide, antigen CD29 includes MDF2, MSK12)), CAST (calpastatin), CXCL12 (chemokine (C-X-C motif) ligand 12 (stromal cell-derived factor 1)), IGHE (immunoglobulin heavy constant epsilon), KCNE1 (potassium voltage-gated channel, Isk-related family, member 1), TFRC (transferrin receptor (p90, CD71)), COL1A1 (collagen, type I, alpha 1), COL1A2 (collagen, type I, alpha 2), IL2RB (interleukin 2 receptor, beta), PLA2G10 (phospholipase A2, group X), ANGPT2 (angiopoietin 2), PROCR (protein C receptor, endothelial (EPCR)), NOX4 (NADPH oxidase 4), HAMP (hepcidin antimicrobial peptide), PTPN11 (protein tyrosine phosphatase, non-receptor type 11), SLC2A1 (solute carrier family 2 (facilitated glucose transporter), member 1), IL2RA (interleukin 2 receptor, alpha), CCL5 (chemokine (C-C motif) ligand 5), IRF1 (interferon regulatory factor 1), CFLAR (CASP8 and FADD-like apoptosis regulator), CALCA (calcitonin-related polypeptide alpha), EIF4E (eukaryotic translation initiation factor 4E), GSTP1 (glutathione S-transferase pi 1), JAK2 (Janus kinase 2), CYP3A5 (cytochrome P450, family 3, subfamily A, polypeptide 5), HSPG2 (heparan sulfate proteoglycan 2), CCL3 (chemokine (C-C motif) ligand 3), MYD88 (myeloid differentiation primary response gene (88)), VIP (vasoactive intestinal peptide), SOAT1 (sterol O-acyltransferase 1), ADRBK1 (adrenergic, beta, receptor kinase 1), NR4A2 (nuclear receptor subfamily 4, group A, member 2), MMP8 (matrix metallopeptidase 8 (neutrophil collagenase)), NPR2 (natriuretic peptide receptor B/guanylate cyclase B (atrionatriuretic peptide receptor B)), GCH1 (GTP cyclohydrolase 1), EPRS (glutamyl-prolyl-tRNA synthetase), PPARGC1A (peroxisome proliferator-activated receptor gamma, coactivator 1 alpha), F12 (coagulation factor XII (Hageman factor)), PECAM1 (platelet/endothelial cell adhesion molecule), CCL4 (chemokine (C-C motif) ligand 4), SERPINA3 (serpin peptidase inhibitor, clade A (alpha-1 antiproteinase, antitrypsin), member 3), CASR (calcium-sensing receptor), GJA5 (gap junction protein, alpha 5, 40 kDa), FABP2 (fatty acid binding protein 2, intestinal), TTF2 (transcription termination factor, RNA polymerase II), PROS1 (protein S (alpha)), CTF1 (cardiotrophin 1), SGCB (sarcoglycan, beta (43 kDa dystrophin-associated glycoprotein)), YME1L1 (YME1-like 1 (S. cerevisiae)), CAMP (cathelicidin antimicrobial peptide), ZC3H12A (zinc finger CCCH-type containing 12A), AKR1B1 (aldo-keto reductase family 1, member B1 (aldose reductase)), DES (desmin), MMP7 (matrix metallopeptidase 7 (matrilysin, uterine)), AHR (aryl hydrocarbon receptor), CSF1 (colony stimulating factor 1 (macrophage)), HDAC9 (histone deacetylase 9), CTGF (connective tissue growth factor), KCNMA1 (potassium large conductance calcium-activated channel, subfamily M, alpha member 1), UGT1A (UDP glucuronosyltransferase 1 family, polypeptide A complex locus), PRKCA (protein kinase C, alpha), COMT (catechol-.beta.-methyltransferase), S100B (S100 calcium binding protein B), EGR1 (early growth response 1), PRL (prolactin), IL15 (interleukin 15), DRD4 (dopamine receptor D4), CAMK2G (calcium/calmodulin-dependent protein kinase II gamma), SLC22A2 (solute carrier family 22 (organic cation transporter), member 2), CCL11 (chemokine (C-C motif) ligand 11), PGF (B321 placental growth factor), THPO (thrombopoietin), GP6 (glycoprotein VI (platelet)), TACR1 (tachykinin receptor 1), NTS (neurotensin), HNF1A (HNF1 homeobox A), SST (somatostatin), KCND1 (potassium voltage-gated channel, Shal-related subfamily, member 1), LOC646627 (phospholipase inhibitor), TBXAS1 (thromboxane A synthase 1 (platelet)), CYP2J2 (cytochrome P450, family 2, subfamily J, polypeptide 2), TBXA2R (thromboxane A2 receptor), ADH1C (alcohol dehydrogenase 1C (class I), gamma polypeptide), ALOX12 (arachidonate 12-lipoxygenase), AHSG (alpha-2-HS-glycoprotein), BHMT (betaine-homocysteine methyltransferase), GJA4 (gap junction protein, alpha 4, 37 kDa), SLC25A4 (solute carrier family 25 (mitochondrial carrier; adenine nucleotide translocator), member 4), ACLY (ATP citrate lyase), ALOX5AP (arachidonate 5-lipoxygenase-activating protein), NUMA1 (nuclear mitotic apparatus protein 1), CYP27B1 (cytochrome P450, family 27, subfamily B, polypeptide 1), CYSLTR2 (cysteinyl leukotriene receptor 2), SOD3 (superoxide dismutase 3, extracellular), LTC4S (leukotriene C4 synthase), UCN (urocortin), GHRL (ghrelin/obestatin prepropeptide), APOC2 (apolipoprotein C-II), CLEC4A (C-type lectin domain family 4, member A), KBTBD10 (kelch repeat and BTB (POZ) domain containing 10), TNC (tenascin C), TYMS (thymidylate synthetase), SHCI (SHC (Src homology 2 domain containing) transforming protein 1), LRP1 (low density lipoprotein receptor-related protein 1), SOCS3 (suppressor of cytokine signaling 3), ADH1B (alcohol dehydrogenase 1B (class I), beta polypeptide), KLK3 (kallikrein-related peptidase 3), HSD11B1 (hydroxysteroid (11-beta) dehydrogenase 1), VKORC1 (vitamin K epoxide reductase complex, subunit 1), SERPINB2 (serpin peptidase inhibitor, clade B (ovalbumin), member 2), TNS1 (tensin 1), RNF19A (ring finger protein 19A), EPOR (erythropoietin receptor), ITGAM (integrin, alpha M (complement component 3 receptor 3 subunit)), PITX2 (paired-like homeodomain 2), MAPK7 (mitogen-activated protein kinase 7), FCGR3A (Fc fragment of IgG, low affinity 111a, receptor (CD16a)), LEPR (leptin receptor), ENG (endoglin), GPX1 (glutathione peroxidase 1), GOT2 (glutamic-oxaloacetic transaminase 2, mitochondrial (aspartate aminotransferase 2)), HRH1 (histamine receptor H1), NR112 (nuclear receptor subfamily 1, group I, member 2), CRH (corticotropin releasing hormone), HTR1A (5-hydroxytryptamine (serotonin) receptor 1A), VDAC1 (voltage-dependent anion channel 1), HPSE (heparanase), SFTPD (surfactant protein D), TAP2 (transporter 2, ATP-binding cassette, sub-family B (MDR/TAP)), RNF123 (ring finger protein 123), PTK2B (PTK2B protein tyrosine kinase 2 beta), NTRK2 (neurotrophic tyrosine kinase, receptor, type 2), IL6R (interleukin 6 receptor), ACHE (acetylcholinesterase (Yt blood group)), GLP1R (glucagon-like peptide 1 receptor), GHR (growth hormone receptor), GSR (glutathione reductase), NQO1 (NAD(P)H dehydrogenase, quinone 1), NR5A1 (nuclear receptor subfamily 5, group A, member 1), GJB2 (gap junction protein, beta 2, 26 kDa), SLC9A1 (solute carrier family 9 (sodium/hydrogen exchanger), member 1), MAOA (monoamine oxidase A), PCSK9 (proprotein convertase subtilisin/kexin type 9), FCGR2A (Fc fragment of IgG, low affinity IIa, receptor (CD32)), SERPINF 1 (serpin peptidase inhibitor, clade F (alpha-2 antiplasmin, pigment epithelium derived factor), member 1), EDN3 (endothelin 3), DHFR (dihydrofolate reductase), GAS6 (growth arrest-specific 6), SMPD1 (sphingomyelin phosphodiesterase 1, acid lysosomal), UCP2 (uncoupling protein 2 (mitochondrial, proton carrier)), TFAP2A (transcription factor AP-2 alpha (activating enhancer binding protein 2 alpha)), C4BPA (complement component 4 binding protein, alpha), SERPINF2 (serpin peptidase inhibitor, clade F (alpha-2 antiplasmin, pigment epithelium derived factor), member 2), TYMP (thymidine phosphorylase), ALPP (alkaline phosphatase, placental (Regan isozyme)), CXCR2 (chemokine (C-X-C motif) receptor 2), SLC39A3 (solute carrier family 39 (zinc transporter), member 3), ABCG2 (ATP-binding cassette, sub-family G (WHITE), member 2), ADA (adenosine deaminase), JAK3 (Janus kinase 3), HSPA1A (heat shock 70 kDa protein 1A), FASN (fatty acid synthase), FGF1 (fibroblast growth factor 1 (acidic)), F11 (coagulation factor XI), ATP7A (ATPase, Cu++ transporting, alpha polypeptide), CR1 (complement component (3b/4b) receptor 1 (Knops blood group)), GFAP (glial fibrillary acidic protein), ROCK1 (Rho-associated, coiled-coil containing protein kinase 1), MECP2 (methyl CpG binding protein 2 (Rett syndrome)), MYLK (myosin light chain kinase), BCHE (butyrylcholinesterase), LIPE (lipase, hormone-sensitive), PRDX5 (peroxiredoxin 5), ADORA1 (adenosine A1 receptor), WRN (Werner syndrome, RecQ helicase-like), CXCR3 (chemokine (C-X-C motif) receptor 3), CD81 (CD81 molecule), SMAD7 (SMAD family member 7), LAMC2 (laminin, gamma 2), MAP3K5 (mitogen-activated protein kinase kinase kinase 5), CHGA (chromogranin A (parathyroid secretory protein 1)), IAPP (islet amyloid polypeptide), RHO (rhodopsin), ENPP1 (ectonucleotide pyrophosphatase/phosphodiesterase 1), PTHLH (parathyroid hormone-like hormone), NRG1 (neuregulin 1), VEGFC (vascular endothelial growth factor C), ENPEP (glutamyl aminopeptidase (aminopeptidase A)), CEBPB (CCAAT/enhancer binding protein (C/EBP), beta), NAGLU (N-acetylglucosaminidase, alpha-), F2RL3 (coagulation factor II (thrombin) receptor-like 3), CX3CL1 (chemokine (C-X3-C motif) ligand 1), BDKRB1 (bradykinin receptor BI), ADAMTS13 (ADAM metallopeptidase with thrombospondin type 1 motif, 13), ELANE (elastase, neutrophil expressed), ENPP2 (ectonucleotide pyrophosphatase/phosphodiesterase 2), CISH (cytokine inducible SH2-containing protein), GAST (gastrin), MYOC (myocilin, trabecular meshwork inducible glucocorticoid response), ATP1A2 (ATPase, Na+/K+ transporting, alpha 2 polypeptide), NF1 (neurofibromin 1), GJB1 (gap junction protein, beta 1, 32 kDa), MEF2A (myocyte enhancer factor 2A), VCL (vinculin), BMPR2 (bone morphogenetic protein receptor, type II (serine/threonine kinase)), TUBB (tubulin, beta), CDC42 (cell division cycle 42 (GTP binding protein, 25 kDa)), KRT18 (keratin 18), HSF1 (heat shock transcription factor 1), MYB (v-myb myeloblastosis viral oncogene homolog (avian)), PRKAA2 (protein kinase, AMP-activated, alpha 2 catalytic subunit), ROCK2 (Rho-associated, coiled-coil containing protein kinase 2), TFPI (tissue factor pathway inhibitor (lipoprotein-associated coagulation inhibitor)), PRKG1 (protein kinase, cGMP-dependent, type I), BMP2 (bone morphogenetic protein 2), CTNND1 (catenin (cadherin-associated protein), delta 1), CTH (cystathionase (cystathionine gamma-lyase)), CTSS (cathepsin S), VAV2 (vav 2 guanine nucleotide exchange factor), NPY2R (neuropeptide Y receptor Y2), IGFBP2 (insulin-like growth factor binding protein 2, 36 kDa), CD28 (CD28 molecule), GSTA1 (glutathione S-transferase alpha 1), PPIA (peptidylprolyl isomerase A (cyclophilin A)), APOH (apolipoprotein H (beta-2-glycoprotein I)), S100A8 (S100 calcium binding protein A8), IL11 (interleukin 11), ALOX15 (arachidonate 15-lipoxygenase), FBLN1 (fibulin 1), NR1H3 (nuclear receptor subfamily 1, group H, member 3), SCD (stearoyl-CoA desaturase (delta-9-desaturase)), GIP (gastric inhibitory polypeptide), CHGB (chromogranin B (secretogranin 1)), PRKCB (protein kinase C, beta), SRD5A1 (steroid-5-alpha-reductase, alpha polypeptide 1 (3-oxo-5 alpha-steroid delta 4-dehydrogenase alpha 1)), HSD11B2 (hydroxysteroid (11-beta) dehydrogenase 2), CALCRL (calcitonin receptor-like), GALNT2 (UDP-N-acetyl-alpha-D-galactosamine:polypeptide N-acetylgalactosaminyltransferase 2 (GalNAc-T2)), ANGPTL4 (angiopoietin-like 4), KCNN4 (potassium intermediate/small conductance calcium-activated channel, subfamily N, member 4), PIK3C2A (phosphoinositide-3-kinase, class 2, alpha polypeptide), HBEGF (heparin-binding EGF-like growth factor), CYP7A1 (cytochrome P450, family 7, subfamily A, polypeptide 1), HLA-DRB5 (major histocompatibility complex, class II, DR beta 5), BNIP3 (BCL2/adenovirus E1B 19 kDa interacting protein 3), GCKR (glucokinase (hexokinase 4) regulator), S100A12 (S100 calcium binding protein A12), PADI4 (peptidyl arginine deiminase, type IV), HSPA14 (heat shock 70 kDa protein 14), CXCR1 (chemokine (C-X-C motif) receptor 1), H19 (H19, imprinted maternally expressed transcript (non-protein coding)), KRTAP19-3 (keratin associated protein 19-3), IDDM2 (insulin-dependent diabetes mellitus 2), RAC2 (ras-related C3 botulinum toxin substrate 2 (rho family, small GTP binding protein Rac2)), RYR1 (ryanodine receptor 1 (skeletal)), CLOCK (clock homolog (mouse)), NGFR (nerve growth factor receptor (TNFR superfamily, member 16)), DBH (dopamine beta-hydroxylase (dopamine beta-monooxygenase)), CHRNA4 (cholinergic receptor, nicotinic, alpha 4), CACNA1C (calcium channel, voltage-dependent, L type, alpha 1C subunit), PRKAG2 (protein kinase, AMP-activated, gamma 2 non-catalytic subunit), CHAT (choline acetyltransferase), PTGDS (prostaglandin D2 synthase 21 kDa (brain)), NR1H2 (nuclear receptor subfamily 1, group H, member 2), TEK (TEK tyrosine kinase, endothelial), VEGFB (vascular endothelial growth factor B), MEF2C (myocyte enhancer factor 2C), MAPKAPK2 (mitogen-activated protein kinase-activated protein kinase 2), TNFRSF11A (tumor necrosis factor receptor superfamily, member 11a, NFKB activator), HSPA9 (heat shock 70 kDa protein 9 (mortalin)), CYSLTR1 (cysteinyl leukotriene receptor 1), MAT1A (methionine adenosyltransferase I, alpha), OPRL1 (opiate receptor-like 1), IMPA1 (inositol(myo)-1(or 4)-monophosphatase 1), CLCN2 (chloride channel 2), DLD (dihydrolipoamide dehydrogenase), PSMA6 (proteasome (prosome, macropain) subunit, alpha type, 6), PSMB8 (proteasome (prosome, macropain) subunit, beta type, 8 (large multifunctional peptidase 7)), CHI3L1 (chitinase 3-like 1 (cartilage glycoprotein-39)), ALDH1B1 (aldehyde dehydrogenase 1 family, member B1), PARP2 (poly (ADP-ribose) polymerase 2), STAR (steroidogenic acute regulatory protein), LBP (lipopolysaccharide binding protein), ABCC6 (ATP-binding cassette, sub-family C(CFTR/MRP), member 6), RGS2 (regulator of G-protein signaling 2, 24 kDa), EFNB2 (ephrin-B2), GJB6 (gap junction protein, beta 6, 30 kDa), APOA2 (apolipoprotein A-II), AMPD1 (adenosine monophosphate deaminase 1), DYSF (dysferlin, limb girdle muscular dystrophy 2B (autosomal recessive)), FDFT1 (farnesyl-diphosphate farnesyltransferase 1), EDN2 (endothelin 2), CCR6 (chemokine (C-C motif) receptor 6), GJB3 (gap junction protein, beta 3, 31 kDa), IL1RL1 (interleukin 1 receptor-like 1), ENTPD1 (ectonucleoside triphosphate diphosphohydrolase 1), BBS4 (Bardet-Biedl syndrome 4), CELSR2 (cadherin, EGF LAG seven-pass G-type receptor 2 (flamingo homolog, Drosophila)), F11R (F11 receptor), RAPGEF3 (Rap guanine nucleotide exchange factor (GEF) 3), HYAL1 (hyaluronoglucosaminidase 1), ZNF259 (zinc finger protein 259), ATOX1 (ATX1 antioxidant protein 1 homolog (yeast)), ATF6 (activating transcription factor 6), KHK (ketohexokinase (fructokinase)), SAT1 (spermidine/spermine N1-acetyltransferase 1), GGH (gamma-glutamyl hydrolase (conjugase, folylpolygammaglutamyl hydrolase)), TIMP4 (TIMP metallopeptidase inhibitor 4), SLC4A4 (solute carrier family 4, sodium bicarbonate cotransporter, member 4), PDE2A (phosphodiesterase 2A, cGMP-stimulated), PDE3B (phosphodiesterase 3B, cGMP-inhibited), FADS1 (fatty acid desaturase 1), FADS2 (fatty acid desaturase 2), TMSB4X (thymosin beta 4, X-linked), TXNIP (thioredoxin interacting protein), LIMS1 (LIM and senescent cell antigen-like domains 1), RHOB (ras homolog gene family, member B), LY96 (lymphocyte antigen 96), FOXO1 (forkhead box 01), PNPLA2 (patatin-like phospholipase domain containing 2), TRH (thyrotropin-releasing hormone), GJC1 (gap junction protein, gamma 1, 45 kDa), SLC17A5 (solute carrier family 17 (anion/sugar transporter), member 5), FTO (fat mass and obesity associated), GJD2 (gap junction protein, delta 2, 36 kDa), PSRC1 (proline/serine-rich coiled-coil 1), CASP12 (caspase 12 (gene/pseudogene)), GPBAR1 (G protein-coupled bile acid receptor 1), PXK (PX domain containing serine/threonine kinase), IL33 (interleukin 33), TRIB1 (tribbles homolog 1 (Drosophila)), PBX4 (pre-B-cell leukemia homeobox 4), NUPR1 (nuclear protein, transcriptional regulator, 1), 15-Sep (15 kDa selenoprotein), CILP2 (cartilage intermediate layer protein 2), TERC (telomerase RNA component), GGT2 (gamma-glutamyltransferase 2), MT-CO1 (mitochondrially encoded cytochrome c oxidase I), and UOX (urate oxidase, pseudogene). Any of these sequences, may be a target for the CRISPR-Cas system, e.g., to address mutation.

[1527] In an additional embodiment, the chromosomal sequence may further be selected from Pon1 (paraoxonase 1), LDLR (LDL receptor), ApoE (Apolipoprotein E), Apo B-100 (Apolipoprotein B-100), ApoA (Apolipoprotein(a)), ApoA1 (Apolipoprotein A1), CBS (Cystathione B-synthase), Glycoprotein IIb/IIb, MTHRF (5, 10-methylenetetrahydrofolate reductase (NADPH), and combinations thereof. In one iteration, the chromosomal sequences and proteins encoded by chromosomal sequences involved in cardiovascular disease may be chosen from Cacna1C, Sod1, Pten, Ppar(alpha), Apo E, Leptin, and combinations thereof as target(s) for the CRISPR-Cas system.

### Treating Diseases of the Liver and Kidney

[1528] The present invention also contemplates delivering the CRISPR-Cas system described herein, e.g. Cpf1 effector protein systems, to the liver and/or kidney. Delivery strategies to induce cellular uptake of the therapeutic nucleic acid include physical force or vector systems such as viral-, lipid- or complex-based delivery, or nanocarriers. From the initial applications with less possible clinical relevance, when nucleic acids were addressed to renal cells with hydrodynamic high pressure injection systemically, a wide range of gene therapeutic viral and non-viral carriers have been applied already to target posttranscriptional events in different animal kidney disease models in vivo (Csaba Revesz and Peter Hamar (2011). Delivery Methods to Target RNAs in the Kidney, Gene Therapy Applications, Prof Chunsheng Kang (Ed.), ISBN: 978-953-307-541-9, InTech, Available from: www.intechopen.com/books/gene-therapy-applications/delivery-methods-to-target-rnas-inthe-kidney). Delivery methods to the kidney may include those in Yuan et al. (Am J Physiol Renal Physiol 295: F605-F617, 2008) investigated whether in vivo delivery of small interfering RNAs (siRNAs) targeting the 12/15-lipoxygenase (12/15-LO) pathway of arachidonate acid metabolism can ameliorate renal injury and diabetic nephropathy (DN) in a streptozotocininjected mouse model of type 1 diabetes. To achieve greater in vivo access and siRNA expression in the kidney, Yuan et al. used double-stranded 12/15-LO siRNA oligonucleotides conjugated with cholesterol. About 400 μg of siRNA was injected subcutaneously into mice. The method of Yuang et al. may be applied to the CRISPR Cas system of the present invention contemplating a 1-2 g subcutaneous injection of CRISPR Cas conjugated with cholesterol to a human for delivery to the kidneys.

[1529] Molitoris et al. (J Am Soc Nephrol 20: 1754-1764, 2009) exploited proximal tubule cells (PTCs), as the site of oligonucleotide reabsorption within the kidney to test the efficacy of siRNA targeted to p53, a pivotal protein in the apoptotic pathway, to prevent kidney injury. Naked synthetic siRNA to p53 injected intravenously 4 h after ischemic injury maximally protected both PTCs and kidney function. Molitoris et al.'s data indicates that rapid delivery of siRNA to proximal tubule cells follows intravenous administration. For dose-response analysis, rats were injected with doses of siP53, 0.33; 1, 3, or 5 mg/kg, given at the same four time points, resulting in cumulative doses of 1.32; 4, 12, and 20 mg/kg, respectively. All siRNA doses tested produced a SCr reducing effect on day one with higher doses being effective over approximately five days compared with PBS-treated ischemic control rats. The 12 and 20 mg/kg cumulative doses provided the best protective effect. The method of Molitoris et al. may be applied to the nucleic acid-targeting system of the present invention contemplating 12 and 20 mg/kg cumulative doses to a human for delivery to the kidneys.

[1530] Thompson et al. (Nucleic Acid Therapeutics, Volume 22, Number 4, 2012) reports the toxicological and pharmacokinetic properties of the synthetic, small interfering RNA I5NP following intravenous administration in rodents and nonhuman primates. I5NP is designed to act via the RNA interference (RNAi) pathway to temporarily inhibit expression of the pro-apoptotic protein p53 and is being developed to protect cells from acute ischemia/reperfusion injuries such as acute kidney injury that can occur during major cardiac surgery and delayed graft function that can occur following renal transplantation. Doses of 800 mg/kg I5NP in rodents, and 1,000 mg/kg I5NP in nonhuman primates, were required to elicit adverse effects, which in the monkey were isolated to direct effects on the blood that included a sub-clinical activation of complement and slightly increased clotting times. In the rat, no additional adverse effects were observed with a rat analogue of I5NP, indicating that the effects likely represent class effects of synthetic RNA duplexes rather than toxicity related to the intended pharmacologic activity of I5NP. Taken together, these data support clinical testing of intravenous administration of I5NP for the preservation of renal function following acute ischemia/reperfusion injury. The no observed adverse effect level (NOAEL) in the monkey was 500 mg/kg. No effects on cardiovascular, respiratory, and neurologic parameters were observed in monkeys following i.v. administration at dose levels up to 25 mg/kg. Therefore, a similar dosage may be contemplated for intravenous administration of CRISPR Cas to the kidneys of a human.

[1531] Shimizu et al. (J Am Soc Nephrol 21: 622-633, 2010) developed a system to target delivery of siRNAs to glomeruli via poly(ethylene glycol)-poly(L-lysine)-based vehicles. The siRNA/nanocarrier complex was approximately 10 to 20 nm in diameter, a size that would allow it to move across the fenestrated endothelium to access to the mesangium. After intraperitoneal injection of fluorescence-labeled siRNA/nanocarrier complexes, Shimizu et al. detected siRNAs in the blood circulation for a prolonged time. Repeated intraperitoneal administration of a mitogen-activated protein kinase 1 (MAPK1) siRNA/nanocarrier complex suppressed glomerular MAPK1 mRNA and protein expression in a mouse model of glomerulonephritis. For the investigation of siRNA accumulation, Cy5-labeled siRNAs complexed with PIC nanocarriers (0.5 ml, 5 nmol of siRNA content), naked Cy5-labeled siRNAs (0.5 ml, 5 nmol), or Cy5-labeled siRNAs encapsulated in HVJ-E (0.5 ml, 5 nmol of siRNA content) were administrated to BALBc mice. The method of Shimizu et al. may be applied to the nucleic acid-targeting system of the present invention contemplating a dose of about of 10-20 μmol CRISPR Cas complexed with nanocarriers in about 1-2 liters to a human for intraperitoneal administration and delivery to the kidneys.

### Delivery Methods to the Kidney are Summarized as Follows:

TABLE 19

| Delivery | | Target | | | Functional | |
|---|---|---|---|---|---|---|
| method | Carrier | RNA | Disease | Model | assays | Author |
| Hydrodynamic/ | TransIT In | p85α | Acute | Ischemia- | Uptake, | Larson et al., |
| Lipid | Vivo Gene | | renal | reperfusion | biodistribution | Surgery, (August |
| | Delivery | | injury | | | 2007), Vol. |
| | System, | | | | | 142, No. 2, pp. |
| | DOTAP | | | | | (262-269) |
| Hydrodynamic/ | Lipofectamine | Fas | Acute | Ischemia- | Blood urea | Hamar et al., |
| Lipid | 2000 | | renal | reperfusion | nitrogen, Fas | Proc Natl |
| | | | injury | | Immunohisto | Acad Sci, (October |
| | | | | | chemistry, | 2004), Vol. |
| | | | | | apoptosis, | 101, No. 41, |
| | | | | | histological | pp. (14883-14888) |
| | | | | | scoring | |
| Hydrodynamic | n.a. | Apoptosis | Acute | Ischemia- | n.a. | Zheng et al., |
| | | cascade | renal | reperfusion | | Am J Pathol, |
| | | elements | injury | | | (October 2008), |
| | | | | | | Vol. 173, No. |
| | | | | | | 4, pp. (973-980) |
| Hydrodynamic | n.a. | Nuclear | Acute | Ischemia- | n.a. | Feng et al., |
| | | factor | renal | reperfusion | | Transplantation, |
| | | kappa-b | injury | | | (May 2009), |
| | | (NFkB) | | | | Vol. 87, No. 9, |
| | | | | | | pp. (1283-1289) |
| Hydrodynamic/ | Lipofectamine | Apoptosis | Acute | Ischemia- | Apoptosis, | Xie & Guo, |
| Viral | 2000 | antagonizing | renal | reperfusion | oxidative | Am Soc |
| | | transcription | injury | | stress, | Nephrol, (December |
| | | factor (AATF) | | | caspase | 2006), Vol. |
| | | | | | activation, | 17, No. 12, pp. |
| | | | | | membrane | (3336-3346) |
| | | | | | lipid | |
| | | | | | peroxidation | |
| Hydrodynamic | pBAsi mU6 | Gremlin | Diabetic | Streptozotozin - | Proteinuria, | Q. Zhang et |
| | Neo/TransIT- | | nephropathy | induced | serum | al., PloS ONE, |
| | EE | | | diabetes | creatinine, | (July 2010), |
| | Hydrodynamic | | | | glomerular | Vol. 5, No. 7, |
| | Delivery | | | | and tubular | el 1709, pp. |
| | System | | | | diameter, | (1-13) |
| | | | | | collagen type | |
| | | | | | IV/BMP7 | |
| | | | | | expression | |
| Viral/Lipid | pSUPER | TGF-β | Interstitial | Unilateral | α-SMA | Kushibikia et |
| | vector/ | type II | renal | urethral | expression, | al., J |
| | Lipofectamine | receptor | fibrosis | obstruction | collagen | Controlled |
| | | | | | content, | Release, (July |
| | | | | | | 2005), Vol. |
| | | | | | | 105, No. 3, pp. |
| | | | | | | (318-331) |
| Viral | Adeno- | Mineral | Hyper- | Cold- | blood | Wang et al., |
| | associated | corticoid | tension | induced | pressure, | Gene Therapy, |
| | virus-2 | receptor | caused | hypertension | serum | (July 2006), |
| | | | renal | | albumin, | Vol. 13, No. 14, |
| | | | damage | | serum urea | pp. (1097-1103) |
| | | | | | nitrogen, | |
| | | | | | serum | |
| | | | | | creatinine, | |
| | | | | | kidney | |
| | | | | | weight, | |
| | | | | | urinary | |
| | | | | | sodium | |
| Hydrodynamic/ | pU6 vector | Luciferase | n.a. | n.a. | uptake | Kobayashi et |
| Viral | | | | | | al., Journal of |
| | | | | | | Pharmacology |
| | | | | | | and |
| | | | | | | Experimental |
| | | | | | | Therapeutics, |
| | | | | | | (February 2004), |
| | | | | | | Vol. 308, No. 2, |
| | | | | | | pp. (688-693) |
| Lipid | Lipoproteins, | apoB1, | n.a. | n.a. | Uptake, | Wolfrum et |
| | albumin | apoM | | | binding | al., Nature |
| | | | | | affinity to | Biotechnology, |
| | | | | | lipoproteins | (September 2007), |
| | | | | | and albumin | Vol. 25, No. 10, |
| | | | | | | pp. (1149-1157) |
| Lipid | Lipofectamine | p53 | Acute | Ischemic | Histological | Molitoris et |
| | 2000 | | renal | and | scoring, | al., J Am Soc |
| | | | injury | cisplatin- | apoptosis | Nephrol, (August |
| | | | | induced | | 2009), Vol. |
| | | | | acute | | 20, No. 8, |
| | | | | injury | | pp. (1754-1764) |
| Lipid | DOTAP/DOPE, | COX-2 | Breast | MDA- | Cell viability, | Mikhaylova e [symbol] |
| | DOTAP/DOPE/ | | adeno- | MB-231 | uptake | [symbol] al., Cancer Gen [symbol] |
| | DOPE-PEG2000 | | carcinoma | breast | | Therapy, (Ma [symbol] |
| | | | | cancer | | 2011), Vol. 16 |
| | | | | xenograft- | | No. 3, pp. |
| | | | | bearing | | (217-226) |
| | | | | mouse | | |
| Lipid | Cholesterol | 12/15- | Diabetic | Streptozotocin | Albuminuria, | Yuan et al., |
| | | lipoxygenase | nephropathy | induced diabetes | urinary | Am J Physiol |
| | | | | | creatinine, | Renal Physiol, |
| | | | | | histology, | (June 2008), |
| | | | | | type I and IV | Vol. 295, pp. |
| | | | | | collagen, | (F605-F617) |
| | | | | | TGF-β, | |
| | | | | | fibronectin, | |
| | | | | | plasminogen | |
| | | | | | activator | |
| | | | | | inhibitor 1 | |
| Lipid | Lipofectamine | Mitochondrial | Diabetic | Streptozotocin - | Cell | Y. Zhang et |
| | 2000 | membrane | nephro- | induced | proliferation | al., J Am Soc |
| | | 44 | pathy | diabetes | and apoptosis, | Nephrol, (April |
| | | (TIM44) | | | histology, | 2006), Vol. |
| | | | | | ROS, | 17, No. 4, pp. |
| | | | | | mitochondrial | (1090-1101) |
| | | | | | import of Mn- | |
| | | | | | SOD and | |
| | | | | | glutathione | |
| | | | | | peroxidase, | |
| | | | | | cellular | |
| | | | | | membrane | |
| | | | | | polarization | |
| Hydrodynamic/ | Proteoliposome | RLIP76 | Renal | Caki-2 | uptake | Singhal et al., |
| Lipid | | | carcinoma | kidney | | Cancer Res, |
| | | | | cancer | | (May 2009), |
| | | | | xenograft- | | Vol. 69, No. 10, |
| | | | | bearing | | pp. (4244-4251) |
| | | | | mouse | | |
| Polymer | PEGylated | Luciferase | n.a. | n.a. | Uptake, | Malek et al., |
| | PEI | pGL3 | | | biodistribution, | Toxicology |
| | | | | | erythrocyte | and Applied |
| | | | | | aggregation | Pharmacology, |
| | | | | | | (April 2009), |
| | | | | | | Vol. 236, No. |
| | | | | | | 1, pp. (97-108) |
| Polymer | PEGylated | MAPK1 | Lupus | Glomerulo- | Proteinuria, | Shimizu et al., |
| | poly-L-lysine | | glomerulo- | nephritis | glomeruloscle | J Am Soc |
| | | | nephritis | | rosis, TGF- β, | Nephrology, |
| | | | | | fibronectin, | (April 2010), |
| | | | | | plasminogen | Vol. 21, No. 4, |
| | | | | | activator | pp. (622-633) |
| | | | | | inhibitor 1 | |
| Polymer/Nano | Hyaluronic | VEGF | Kidney | B16F1 | Biodistribution, | Jiang et al., |
| particle | acid/Quantum | | cancer/ | melanoma | citotoxicity, | Molecular |
| | dot/PEI | | melanoma | tumor- | tumor | Pharmaceutics, |
| | | | | bearing | volume, | (May-June |
| | | | | mouse | endocytosis | 2009), Vol. 6, |
| | | | | | | No. 3, pp. |
| | | | | | | (727-737) |
| Polymer/Nano | PEGylated | GAPDH | n.a. | n.a. | cell viability, | Cao et al, J |
| particle | polycapro- | | | | uptake | Controlled |
| | lactone | | | | | Release, (June |
| | nanofiber | | | | | 2010), Vol. |
| | | | | | | 144, No. 2, pp. |
| | | | | | | (203-212) |
| Aptamer | Spiegelmer | CC | Glomerulo | Uninephrecto- | urinary | Ninichuk et |
| | mNOX-E36 | chemokine | sclerosis | mized mouse | albumin, | al., Am J |
| | | ligand 2 | | | urinary | Pathol, (March |
| | | | | | creatinine, | 2008), Vol. |
| | | | | | histopathology, | 172, No. 3, pp. |
| | | | | | glomerular | (628-637) |
| | | | | | filtration rate, | |
| | | | | | macrophage | |
| | | | | | count, serum | |
| | | | | | Ccl2, Mac- | |
| | | | | | 2+, Ki-67+ | |
| Aptamer | Aptamer | vasopressin | Congestive | n.a. | Binding | Purschke et |
| | NOX-F37 | (AVP) | heart | | affinity to D- | al., Proc Natl |
| | | | failure | | AVP, | Acad Sci, |
| | | | | | Inhibition of | (March 2006), |
| | | | | | AVP | Vol. 103, No. 13, |
| | | | | | Signaling, | pp. (5173-5178) |
| | | | | | Urine | |
| | | | | | osmolality | |
| | | | | | and sodium | |
| | | | | | concentration, | |

[symbol]

indicates data missing or illegible when filed

### Targeting the Liver or Liver Cells

[1533] Targeting liver cells is provided. This may be in vitro or in vivo. Hepatocytes are preferred. Delivery of the CRISPR protein, such as Cpf1 herein may be via viral vectors, especially AAV (and in particular AAV2/6) vectors. These may be administered by intravenous injection.

[1534] A preferred target for liver, whether in vitro or in vivo, is the albumin gene. This is a so-called ‘safe harbor” as albumin is expressed at very high levels and so some reduction in the production of albumin following successful gene editing is tolerated. It is also preferred as the high levels of expression seen from the albumin promoter/enhancer allows for useful levels of correct or transgene production (from the inserted donor template) to be achieved even if only a small fraction of hepatocytes are edited.

[1535] Intron 1 of albumin has been shown by Wechsler et al. (reported at the 57th Annual Meeting and Exposition of the American Society of Hematology—abstract available online at ash.confex.com/ash/2015/webprogram/Paper86495.html and presented on 6 Dec. 2015) to be a suitable target site. Their work used Zn Fingers to cut the DNA at this target site, and suitable guide sequences can be generated to guide cleavage at the same site by a CRISPR protein.

[1536] The use of targets within highly-expressed genes (genes with highly active enhancers/promoters) such as albumin may also allow a promoterless donor template to be used, as reported by Wechsler et al. and this is also broadly applicable outside liver targeting. Other examples of highly-expressed genes are known.

### Other Disease of the Liver

[1537] In particular embodiments, the CRISPR proteins of the present invention are used in the treatment of liver disorders such as transthyretin amyloidosis (ATTR), alpha-1 antitrypsin deficiency and other hepatic-based inborn errors of metabolism. FAP is caused by a mutation in the gene that encodes transthyretin (TTR). While it is an autosomal dominant disease, not all carriers develop the disease. There are over 100 mutations in the TTR gene known to be associated with the disease. Examples of common mutations include V30M. The principle of treatment of TTR based on gene silencing has been demonstrated by studies with iRNA (Ueda et al. 2014 Transl Neurogener. 3:19). Wilson's Disease (WD) is caused by mutations in the gene encoding ATP7B, which is found exclusively in the hepatocyte. There are over 500 mutations associated with WD, with increased prevalence in specific regions such as East Asia. Other examples are A1ATD (an autosomal recessive disease caused by mutations in the SERPINA1 gene) and PKU (an autosomal recessive disease caused by mutations in the phenylalanine hydroxylase (PAH) gene).

### Liver—Associated Blood Disorders, Especially Hemophilia and in Particular Hemophilia B

[1538] Successful gene editing of hepatocytes has been achieved in mice (both in vitro and in vivo) and in non-human primates (in vivo), showing that treatment of blood disorders through gene editing/genome engineering in hepatocytes is feasible. In particular, expression of the human F9 (hF9) gene in hepatocytes has been shown in non-human primates indicating a treatment for Hemophillia B in humans.

[1539] Wechsler et al. reported at the 57th Annual Meeting and Exposition of the American Society of Hematology (abstract presented 6 Dec. 2015 and available online at ash.confex.com/ash/2015/webprogram/Paper86495.html) that they has successfully expressed human F9 (hF9) from hepatocytes in non-human primates through in vivo gene editing. This was achieved using 1) two zinc finger nucleases (ZFNs) targeting intron 1 of the albumin locus, and 2) a human F9 donor template construct. The ZFNs and donor template were encoded on separate hepatotropic adeno-associated virus serotype 2/6 (AAV2/6) vectors injected intravenously, resulting in targeted insertion of a corrected copy of the hF9 gene into the albumin locus in a proportion of liver hepatocytes.

[1540] The albumin locus was selected as a “safe harbor” as production of this most abundant plasma protein exceeds 10 g/day, and moderate reductions in those levels are well-tolerated. Genome edited hepatocytes produced normal hFIX (hF9) in therapeutic quantities, rather than albumin, driven by the highly active albumin enhancer/promoter. Targeted integration of the hF9 transgene at the albumin locus and splicing of this gene into the albumin transcript was shown.

[1541] Mice studies: C57BL/6 mice were administered vehicle (n=20) or AAV2/6 vectors (n=25) encoding mouse surrogate reagents at 1.0×1013 vector genome (vg)/kg via tail vein injection. ELISA analysis of plasma hFIX in the treated mice showed peak levels of 50-1053 ng/mL that were sustained for the duration of the 6-month study. Analysis of FIX activity from mouse plasma confirmed bioactivity commensurate with expression levels.

[1542] Non-human primate (NHP) studies: a single intravenous co-infusion of AAV2/6 vectors encoding the NHP targeted albumin-specific ZFNs and a human F9 donor at 1.2×1013 vg/kg (n=5/group) resulted in >50 ng/mL (>1% of normal) in this large animal model. The use of higher AAV2/6 doses (up to 1.5×1014 vg/kg) yielded plasma hFIX levels up to 1000 ng/ml (or 20% of normal) in several animals and up to 2000 ng/ml (or 50% of normal) in a single animal, for the duration of the study (3 months).

[1543] The treatment was well tolerated in mice and NHPs, with no significant toxicological findings related to AAV2/6 ZFN+donor treatment in either species at therapeutic doses. Sangamo (CA, USA) has since applied to the FDA, and been granted, permission to conduct the world's first human clinical trial for an in vivo genome editing application. This follows on the back of the EMEA's approval of the Glybera gene therapy treatment of lipoprotein lipase deficiency.

[1544] Accordingly, it is preferred, in some embodiments, that any or all of the following are used: AAV (especially AAV2/6) vectors, preferably administered by intravenous injection; Albumin as target for gene editing/insertion of transgene/template-especially at intron 1 of albumin; human F9 donor template; and/or a promoterless donor template.

### Hemophilia B

[1545] Accordingly, in some embodiments, it is preferred that the present invention is used to treat Hemophilia B. As such it is preferred that F9 (Factor IX) is targeted through provision of a suitable guide RNA. The enzyme and the guide may ideally be targeted to the liver where F9 is produced, although they can be delivered together or separately. A template is provided, in some embodiments, and that this is the human F9 gene. It will be appreciated that the hF9 template comprises the wt or ‘correct’ version of hF9 so that the treatment is effective. In some embodiments, a two-vector system may be used—one vector for the Cas and one vector for the repair template(s). The repair template may include two or more repair templates, for example, two F9 sequences from different mammalian species. In some embodiments, both a mouse and human F9 sequence are provided. This is may be delivered to mice. Yang Yang, John White, McMenamin Deirdre, and Peter Bell, PhD, presenting at 58th Annual American Society of Hematology Meeting (November 2016), report that this increases potency and accuracy. The second vector inserted the human sequence of factor IX into the mouse genome. In some embodiments, the targeted insertion leads to the expression of a chimeric hyperactive factor IX protein. In some embodiments, this is under the control of the native mouse factor IX promoter. Injecting this two-component system (vector 1 and vector 2) into newborn and adult “knock-out” mice at increasing doses led to expression and activity of stable factor IX activity at normal (or even higher) levels for over four months. In the case of treating humans, a native human F9 promoter may be used instead. In some embodiments, the wt phenotype is restored.

[1546] In an alternative embodiment, the hemophilia B version of F9 may be delivered so as to create a model organism, cell or cell line (for example a murine or non-human primate model organism, cell or cell line), the model organism, cell or cell line having or carrying the Hemophilia B phenotype, i.e. an inability to produce wt F9.

### Hemophilia A

[1547] In some embodiments, the F9 (factor IX) gene may be replaced by the F8 (factor VIII) gene described above, leading to treatment of Hemophilia A (through provision of a correct F8 gene) and/or creation of a Hemophilia A model organism, cell or cell line (through provision of an incorrect, Hemophilia A version of the F8 gene).

### Hemophilia C

[1548] In some embodiments, the F9 (factor IX) gene may be replaced by the F11 (factor XI) gene described above, leading to treatment of Hemophilia C (through provision of a correct F11 gene) and/or creation of a Hemophilia C model organism, cell or cell line (through provision of an incorrect, Hemophilia C version of the F11 gene).

### Transthyretin Amyloidosis

[1549] Transthyretin is a protein, mainly produced in the liver, present in the serum and CSF which carries thyroxin hormone and retinol binding protein bound to retinol (Vitamin A). Over 120 different mutations can cause Transthyretin amyloidosis (ATTR), a heritable genetic disorder wherein mutant forms of the protein aggregate in tissues, particularly the peripheral nervous system, causing polyneuropathy. Familial amyloid polyneuropathy (FAP) is the most common TTR disorder and, in 2014, was thought to affect 47 per 100,000 people in Europe. A mutation in the TTR gene of Val30Met is thought be the most common mutation, causing an estimated 50% of FAP cases. In the absence a liver transplant, the only known cure to date, the disease is usually fatal within a decade of diagnosis. The majority of cases are monogenic.

[1550] In mouse models of ATTR, the TTR gene may be edited in a dose dependent manner by the delivery of CRISPR/Cas9. In some embodiments, the Cas is provided as mRNA. In some embodiments, Cas mRNA and guide RNA are packaged in LNPs. A system comprising Cas mRNA and guide RNA packaged in LNPs achieved up to 60% editing efficiency in the liver, with serum TTR levels being reduced by up to 80%. In some embodiments, therefore, Transthyretin is targeted, in particular correcting for the Val30Met mutation. In some embodiments, therefore, ATTR is treated.

### Alpha-1 Antitrypsin Deficiency

[1551] Alpha-1 Antitrypsin (A1AT) is a protein produced in the liver which primarily functions to decrease the activity of neutrophil elastase, an enzyme which degrades connective tissue, in the lungs. Alpha-1 Antitrypsin Deficiency (ATTD) is a disease caused by mutation of the SERPINA1 gene, which encodes A1AT. Impaired production of A1AT leads to a gradual degredation of the connective tissue of the lung resulting in emphysema like symptoms.

[1552] Several mutations can cause ATTD, though the most common mutations are Glu342Lys (referred to as Z allele, wild-type is referred to as M) or Glu264Val (referred to as the S allele), and each allele contributes equally to the disease state, with two affected alleles resulting in more pronounced pathophysiology. These results not only resulted in degradation of the connective tissue of sensitive organs, such as the lung, but accumulation of the mutants in the liver can result in proteotoxicity. Current treatments focus on the replacement of A1AT by injection of protein retrieved from donated human plasma. In severe cases a lung and/or liver transplant may be considered.

[1553] The common variants of the disease are again monogenic. In some embodiments, the SERPINA1 gene is targeted. In some embodiments, the Glu342Lys mutation (referred to as Z allele, wild-type is referred to as M) or the Glu264Val mutation (referred to as the S allele) are corrected for. In some embodiments, therefore, the faulty gene would require replacement by the wild-type functioning gene. In some embodiments, a knockout and repair approach is required, so a repair template is provided. In the case of bi-allelic mutations, in some embodiments only one guide RNA would be required for homozygous mutations, but in the case of heterozygous mutations two guide RNAs may be required. Delivery is, in some embodiments, to the lung or liver.

### Inborn Errors of Metabolism

[1554] Inborn errors of metabolism (IEMs) are an umbrella group of diseases which affect metabolic processes. In some embodiments, an IEM is to be treated. The majority of these diseases are monogenic in nature (e.g. phenylketonuria) and the pathophysiology results from either the abnormal accumulation of substances which are inherently toxic, or mutations which result in an inability to synthesize essential substances. Depending on the nature of the IEM, CRISPR/Cas may be used to facilitate a knock-out alone, or in combination with replacement of a faulty gene via a repair template. Exemplary diseases that may benefit from CRISPR/Cas technology are, in some embodiments: primary hyperoxaluria type 1 (PH1), argininosuccinic lyase deficiency, ornithine transcarbamylase deficiency, phenylketonuria, or PKU, and maple syrup urine disease.

### Treating Epithelial and Lung Diseases

[1555] The present invention also contemplates delivering the CRISPR-Cas system described herein, e.g. Cpf1 effector protein systems, to one or both lungs.

[1556] Although AAV-2-based vectors were originally proposed for CFTR delivery to CF airways, other serotypes such as AAV-1, AAV-5, AAV-6, and AAV-9 exhibit improved gene transfer efficiency in a variety of models of the lung epithelium (see, e.g., Li et al., Molecular Therapy, vol. 17 no. 12, 2067-277 December 2009). AAV-1 was demonstrated to be ˜100-fold more efficient than AAV-2 and AAV-5 at transducing human airway epithelial cells in vitro, 5 although AAV-1 transduced murine tracheal airway epithelia in vivo with an efficiency equal to that of AAV-5. Other studies have shown that AAV-5 is 50-fold more efficient than AAV-2 at gene delivery to human airway epithelium (HAE) in vitro and significantly more efficient in the mouse lung airway epithelium in vivo. AAV-6 has also been shown to be more efficient than AAV-2 in human airway epithelial cells in vitro and murine airways in vivo. 8 The more recent isolate, AAV-9, was shown to display greater gene transfer efficiency than AAV-5 in murine nasal and alveolar epithelia in vivo with gene expression detected for over 9 months suggesting AAV may enable long-term gene expression in vivo, a desirable property for a CFTR gene delivery vector. Furthermore, it was demonstrated that AAV-9 could be readministered to the murine lung with no loss of CFTR expression and minimal immune consequences. CF and non-CF HAE cultures may be inoculated on the apical surface with 100 μl of AAV vectors for hours (see, e.g., Li et al., Molecular Therapy, vol. 17 no. 12, 2067-277 December 2009). The MOI may vary from 1×10³ to 4×10⁵ vector genomes/cell, depending on virus concentration and purposes of the experiments. The above cited vectors are contemplated for the delivery and/or administration of the invention.

[1557] Zamora et al. (Am J Respir Crit Care Med Vol 183. pp 531-538, 2011) reported an example of the application of an RNA interference therapeutic to the treatment of human infectious disease and also a randomized trial of an antiviral drug in respiratory syncytial virus (RSV)-infected lung transplant recipients. Zamora et al. performed a randomized, double-blind, placebocontrolled trial in LTX recipients with RSV respiratory tract infection. Patients were permitted to receive standard of care for RSV. Aerosolized ALN-RSV01 (0.6 mg/kg) or placebo was administered daily for 3 days. This study demonstrates that an RNAi therapeutic targeting RSV can be safely administered to LTX recipients with RSV infection. Three daily doses of ALN-RSV01 did not result in any exacerbation of respiratory tract symptoms or impairment of lung function and did not exhibit any systemic proinflammatory effects, such as induction of cytokines or CRP. Pharmacokinetics showed only low, transient systemic exposure after inhalation, consistent with preclinical animal data showing that ALN-RSV01, administered intravenously or by inhalation, is rapidly cleared from the circulation through exonucleasemediated digestion and renal excretion. The method of Zamora et al. may be applied to the nucleic acid-targeting system of the present invention and an aerosolized CRISPR Cas, for example with a dosage of 0.6 mg/kg, may be contemplated for the present invention.

[1558] Subjects treated for a lung disease may for example receive pharmaceutically effective amount of aerosolized AAV vector system per lung endobronchially delivered while spontaneously breathing. As such, aerosolized delivery is preferred for AAV delivery in general. An adenovirus or an AAV particle may be used for delivery. Suitable gene constructs, each operably linked to one or more regulatory sequences, may be cloned into the delivery vector. In this instance, the following constructs are provided as examples: Cbh or EFla promoter for Cas, U6 or H1 promoter for guide RNA): A preferred arrangement is to use a CFTRdelta508 targeting guide, a repair template for deltaF508 mutation and a codon optimized Casenzyme, with optionally one or more nuclear localization signal or sequence(s) (NLS(s)), e.g., two (2) NLSs. Constructs without NLS are also envisaged.

[1559] Treating Diseases of the Muscular System

[1560] The present invention also contemplates delivering the CRISPR-Cas system described herein, e.g. Caseffector protein systems, to muscle(s).

[1561] Bortolanza et al. (Molecular Therapy vol. 19 no. 11, 2055-264 November 2011) shows that systemic delivery of RNA interference expression cassettes in the FRG1 mouse, after the onset of facioscapulohumeral muscular dystrophy (FSHD), led to a dose-dependent long-term FRG1 knockdown without signs of toxicity. Bortolanza et al. found that a single intravenous injection of 5×10¹² vg of rAAV6-shlFRG1 rescues muscle histopathology and muscle function of FRG1 mice. In detail, 200 μl containing 2×10¹² or 5×10¹² vg of vector in physiological solution were injected into the tail vein using a 25-gauge Terumo syringe. The method of Bortolanza et al. may be applied to an AAV expressing CRISPR Cas and injected into humans at a dosage of about 2×10¹⁵ or 2×10¹⁶ vg of vector.

[1562] Dumonceaux et al. (Molecular Therapy vol. 18 no. 5, 881-887 May 2010) inhibit the myostatin pathway using the technique of RNA interference directed against the myostatin receptor AcvRIIb mRNA (sh-AcvRIIb). The restoration of a quasi-dystrophin was mediated by the vectorized U7 exon-skipping technique (U7-DYS). Adeno-associated vectors carrying either the sh-AcvrIIb construct alone, the U7-DYS construct alone, or a combination of both constructs were injected in the tibialis anterior (TA) muscle of dystrophic mdx mice. The injections were performed with 10¹¹ AAV viral genomes. The method of Dumonceaux et al. may be applied to an AAV expressing CRISPR Cas and injected into humans, for example, at a dosage of about 10¹⁴ to about 10¹⁵ vg of vector.

[1563] Kinouchi et al. (Gene Therapy (2008) 15, 1126-1130) report the effectiveness of in vivo siRNA delivery into skeletal muscles of normal or diseased mice through nanoparticle formation of chemically unmodified siRNAs with atelocollagen (ATCOL). ATCOL-mediated local application of siRNA targeting myostatin, a negative regulator of skeletal muscle growth, in mouse skeletal muscles or intravenously, caused a marked increase in the muscle mass within a few weeks after application. These results imply that ATCOL-mediated application of siRNAs is a powerful tool for future therapeutic use for diseases including muscular atrophy. MstsiRNAs (final concentration, 10 mM) were mixed with ATCOL (final concentration for local administration, 0.5%) (AteloGene, Kohken, Tokyo, Japan) according to the manufacturer's instructions. After anesthesia of mice (20-week-old male C57BL/6) by Nembutal (25 mg/kg, i.p.), the Mst-siRNA/ATCOL complex was injected into the masseter and biceps femoris muscles. The method of Kinouchi et al. may be applied to CRISPR Cas and injected into a human, for example, at a dosage of about 500 to 1000 ml of a 40 μM solution into the muscle. Hagstrom et al. (Molecular Therapy Vol. 10, No. 2, August 2004) describe an intravascular, nonviral methodology that enables efficient and repeatable delivery of nucleic acids to muscle cells (myofibers) throughout the limb muscles of mammals. The procedure involves the injection of naked plasmid DNA or siRNA into a distal vein of a limb that is transiently isolated by a tourniquet or blood pressure cuff. Nucleic acid delivery to myofibers is facilitated by its rapid injection in sufficient volume to enable extravasation of the nucleic acid solution into muscle tissue. High levels of transgene expression in skeletal muscle were achieved in both small and large animals with minimal toxicity. Evidence of siRNA delivery to limb muscle was also obtained. For plasmid DNA intravenous injection into a rhesus monkey, a threeway stopcock was connected to two syringe pumps (Model PHD 2000; Harvard Instruments), each loaded with a single syringe. Five minutes after a papaverine injection, pDNA (15.5 to 25.7 mg in 40-100 ml saline) was injected at a rate of 1.7 or 2.0 ml/s. This could be scaled up for plasmid DNA expressing CRISPR Cas of the present invention with an injection of about 300 to 500 mg in 800 to 2000 ml saline for a human. For adenoviral vector injections into a rat, 2×10⁹ infectious particles were injected in 3 ml of normal saline solution (NSS). This could be scaled up for an adenoviral vector expressing CRISPR Cas of the present invention with an injection of about 1×10¹³ infectious particles were injected in 10 liters of NSS for a human. For siRNA, a rat was injected into the great saphenous vein with 12.5 μg of a siRNA and a primate was injected injected into the great saphenous vein with 750 μg of a siRNA. This could be scaled up for a CRISPR Cas of the present invention, for example, with an injection of about 15 to about 50 mg into the great saphenous vein of a human.

[1564] See also, for example, WO2013163628 A2, Genetic Correction of Mutated Genes, published application of Duke University describes efforts to correct, for example, a frameshift mutation which causes a premature stop codon and a truncated gene product that can be corrected via nuclease mediated non-homologous end joining such as those responsible for Duchenne Muscular Dystrophy, (“DMD”) a recessive, fatal, X-linked disorder that results in muscle degeneration due to mutations in the dystrophin gene. The majority of dystrophin mutations that cause DMD are deletions of exons that disrupt the reading frame and cause premature translation termination in the dystrophin gene. Dystrophin is a cytoplasmic protein that provides structural stability to the dystroglycan complex of the cell membrane that is responsible for regulating muscle cell integrity and function. The dystrophin gene or “DMD gene” as used interchangeably herein is 2.2 megabases at locus Xp21. The primary transcription measures about 2,400 kb with the mature mRNA being about 14 kb. 79 exons code for the protein which is over 3500 amino acids. Exon 51 is frequently adjacent to frame-disrupting deletions in DMD patients and has been targeted in clinical trials for oligonucleotide-based exon skipping. A clinical trial for the exon 51 skipping compound eteplirsen recently reported a significant functional benefit across 48 weeks, with an average of 47% dystrophin positive fibers compared to baseline. Mutations in exon 51 are ideally suited for permanent correction by NHEJ-based genome editing.

[1565] The methods of US Patent Publication No. 20130145487 assigned to Cellectis, which relates to meganuclease variants to cleave a target sequence from the human dystrophin gene (DMD), may also be modified to for the nucleic acid-targeting system of the present invention.

### Treating Diseases of the Skin

[1566] The present invention also contemplates delivering the CRISPR-Cas system described herein to the skin.

[1567] Hickerson et al. (Molecular Therapy-Nucleic Acids (2013) 2, e129) relates to a motorized microneedle array skin delivery device for delivering self-delivery (sd)-siRNA to human and murine skin. The primary challenge to translating siRNA-based skin therapeutics to the clinic is the development of effective delivery systems. Substantial effort has been invested in a variety of skin delivery technologies with limited success. In a clinical study in which skin was treated with siRNA, the exquisite pain associated with the hypodermic needle injection precluded enrollment of additional patients in the trial, highlighting the need for improved, more “patient-friendly” (i.e., little or no pain) delivery approaches. Microneedles represent an efficient way to deliver large charged cargos including siRNAs across the primary barrier, the stratum corneum, and are generally regarded as less painful than conventional hypodermic needles. Motorized “stamp type” microneedle devices, including the motorized microneedle array (MMNA) device used by Hickerson et al., have been shown to be safe in hairless mice studies and cause little or no pain as evidenced by (i) widespread use in the cosmetic industry and (ii) limited testing in which nearly all volunteers found use of the device to be much less painful than a flushot, suggesting siRNA delivery using this device will result in much less pain than was experienced in the previous clinical trial using hypodermic needle injections. The MMNA device (marketed as Triple-M or Tri-M by Bomtech Electronic Co, Seoul, South Korea) was adapted for delivery of siRNA to mouse and human skin. sd-siRNA solution (up to 300 μl of 0.1 mg/ml RNA) was introduced into the chamber of the disposable Tri-M needle cartridge (Bomtech), which was set to a depth of 0.1 mm. For treating human skin, deidentified skin (obtained immediately following surgical procedures) was manually stretched and pinned to a cork platform before treatment. All intradermal injections were performed using an insulin syringe with a 28-gauge 0.5-inch needle. The MMNA device and method of Hickerson et al. could be used and/or adapted to deliver the CRISPR Cas of the present invention, for example, at a dosage of up to 300 μl of 0.1 mg/ml CRISPR Cas to the skin.

[1568] Leachman et al. (Molecular Therapy, vol. 18 no. 2, 442-446 February 2010) relates to a phase Ib clinical trial for treatment of a rare skin disorder pachyonychia congenita (PC), an autosomal dominant syndrome that includes a disabling plantar keratoderma, utilizing the first short-interfering RNA (siRNA)-based therapeutic for skin. This siRNA, called TD101, specifically and potently targets the keratin 6a (K6a) N171K mutant mRNA without affecting wild-type K6a mRNA.

[1569] Zheng et al. (PNAS, Jul. 24, 2012, vol. 109, no. 30, 11975-11980) show that spherical nucleic acid nanoparticle conjugates (SNA-NCs), gold cores surrounded by a dense shell of highly oriented, covalently immobilized siRNA, freely penetrate almost 100% of keratinocytes in vitro, mouse skin, and human epidermis within hours after application. Zheng et al. demonstrated that a single application of 25 nM epidermal growth factor receptor (EGFR) SNA-NCs for 60 h demonstrate effective gene knockdown in human skin. A similar dosage may be contemplated for CRISPR Cas immobilized in SNA-NCs for administration to the skin. Cancer

[1570] In some embodiments, the treatment, prophylaxis or diagnosis of cancer is provided. The target is preferably one or more of the FAS, BID, CTLA4, PDCD1, CBLB, PTPN6, TRAC or TRBC genes. The cancer may be one or more of lymphoma, chronic lymphocytic leukemia (CLL), B cell acute lymphocytic leukemia (B-ALL), acute lymphoblastic leukemia, acute myeloid leukemia, non-Hodgkin's lymphoma (NHL), diffuse large cell lymphoma (DLCL), multiple myeloma, renal cell carcinoma (RCC), neuroblastoma, colorectal cancer, breast cancer, ovarian cancer, melanoma, sarcoma, prostate cancer, lung cancer, esophageal cancer, hepatocellular carcinoma, pancreatic cancer, astrocytoma, mesothelioma, head and neck cancer, and medulloblastoma. This may be implemented with engineered chimeric antigen receptor (CAR) T cell. This is described in WO2015161276, the disclosure of which is hereby incorporated by reference and described herein below.

[1571] Target genes suitable for the treatment or prophylaxis of cancer may include, in some embodiments, those described in WO2015048577 the disclosure of which is hereby incorporated by reference.

### Usher Syndrome or Retinitis Pigmentosa-39

[1572] In some embodiments, the treatment, prophylaxis or diagnosis of Usher Syndrome or retinitis pigmentosa-39 is provided. The target is preferably the USH2A gene. In some embodiments, correction of a G deletion at position 2299 (2299delG) is provided. This is described in WO2015134812A1, the disclosure of which is hereby incorporated by reference.

### Autoimmune and Inflammatory Disorders

[1573] In some embodiments, autoimmune and inflammatory disorders are treated. These include Multiple Sclerosis (MS) or Rheumatoid Arthritis (RA), for example.

### Cystic Fibrosis (CF)

[1574] In some embodiments, the treatment, prophylaxis or diagnosis of cystic fibrosis is provided. The target is preferably the SCNN1A or the CFTR gene. This is described in WO2015157070, the disclosure of which is hereby incorporated by reference.

[1575] Schwank et al. (Cell Stem Cell, 13:653-58, 2013) used CRISPR-Cas9 to correct a defect associated with cystic fibrosis in human stem cells. The team's target was the gene for an ion channel, cystic fibrosis transmembrane conductor receptor (CFTR). A deletion in CFTR causes the protein to misfold in cystic fibrosis patients. Using cultured intestinal stem cells developed from cell samples from two children with cystic fibrosis, Schwank et al. were able to correct the defect using CRISPR along with a donor plasmid containing the reparative sequence to be inserted. The researchers then grew the cells into intestinal “organoids,” or miniature guts, and showed that they functioned normally. In this case, about half of clonal organoids underwent the proper genetic correction.

[1576] In some embodiments, Cystic fibrosis is treated, for example. Delivery to the lungs is therefore preferred. The F508 mutation (delta-F508, full name CFTRAF508 or F508del-CFTR) is preferably corrected. In some embodiments, the targets may be ABCC7, CF or MRP7.

### Duchenne's Muscular Dystrophy

[1577] Duchenne's muscular dystrophy (DMD) is a recessive, sex-linked muscle wasting disease that affects approximately 1 in 5000 males at birth. Mutations of the dystrophin gene result in an absence of dystrophin in skeletal muscle, where it normally functions to connect the cytoskeleton of the muscle fiber to the basal lamina. The absence of dystrophin caused be these mutations results in excessive calcium entry into the soma which causes the mitochondria to rupture, destroying the cell. Current treatments are focused on easing the symptoms of DMD, and the average life expetency is approximately 26 years.

[1578] CRISPR/Cas9 efficacy as a treatment for certain types of DMD has been demonstrated in mouse models. In one such study, the muscular dystrophy phenotype was partially corrected in the mouse by knocking-out a mutant exon resulting in a functional protein (see Nelson et al. (2016) Science, Long et al. (2016) Science, and Tabebordbar et al. (2016) Science).

[1579] In some embodiments, DMD is treated. In some embodiments, delivery is to the muscle by injection.

### Glycogen Storage Diseases, Including 1a

[1580] Glycogen Storage Disease 1a is a genetic disease resulting from deficiency of the enzyme glucose-6-phosphatase. The deficiency impairs the ability of the liver to produce free glucose from glycogen and from gluconeogenesis. In some embodiments, the gene encoding the glucose-6-phosphatase enzyme is targeted. In some embodiments, Glycogen Storage Disease 1a is treated. In some embodiments, delivery is to the liver by encapsulation of the Cas (in protein or mRNA form) in a lipid particle, such as an LNP.

[1581] In some embodiments, Glycogen Storage Diseases, including 1a, are targeted and preferably treated, for example by targeting polynucleotides associated with the condition/disease/infection. The associated polynucleotides include DNA, which may include genes (where genes include any coding sequence and regulatory elements such as enhancers or promoters). In some embodiments, the associated polynucleotides may include the SLC2A2, GLUT2, G6PC, G6PT, G6PT1, GAA, LAMP2, LAMPB, AGL, GDE, GBE1, GYS2, PYGL, or PFKM genes.

### Hurler Syndrome

[1582] Hurler syndrome, also known as mucopolysaccharidosis type I (MPS I), Hurler's disease, is a genetic disorder that results in the buildup of glycosaminoglycans (formerly known as mucopolysaccharides) due to a deficiency of alpha-L iduronidase, an enzyme responsible for the degradation of mucopolysaccharides in lysosomes. Hurler syndrome is often classified as a lysosomal storage disease, and is clinically related to Hunter Syndrome. Hunter syndrome is X-linked while Hurler syndrome is autosomal recessive. MPS I is divided into three subtypes based on severity of symptoms. All three types result from an absence of, or insufficient levels of, the enzyme α-L-iduronidase. MPS I H or Hurler syndrome is the most severe of the MPS I subtypes. The other two types are MPS I S or Scheie syndrome and MPS I H-S or Hurler-Scheie syndrome. Children born to an MPS I parent carry a defective IDUA gene, which has been mapped to the 4p16.3 site on chromosome 4. The gene is named IDUA because of its iduronidase enzyme protein product. As of 2001, 52 different mutations in the IDUA gene have been shown to cause Hurler syndrome. Successful treatment of the mouse, dog, and cat models of MPS I by delivery of the iduronidase gene through retroviral, lentiviral, AAV, and even nonviral vectors.

[1583] In some embodiments, the α-L-iduronidase gene is targeted and a repair template preferably provided.

### HIV and AIDS

[1584] In some embodiments, the treatment, prophylaxis or diagnosis of HIV and AIDS is provided. The target is preferably the CCR5 gene in HIV. This is described in WO2015148670A1, the disclosure of which is hereby incorporated by reference.

### Beta Thalassaemia

[1585] In some embodiments, the treatment, prophylaxis or diagnosis of Beta Thalassaemia is provided. The target is preferably the BCL11A gene. This is described in WO2015148860, the disclosure of which is hereby incorporated by reference.

### Sickle Cell Disease (SCD)

[1586] In some embodiments, the treatment, prophylaxis or diagnosis of Sickle Cell Disease (SCD) is provided. The target is preferably the HBB or BCL11A gene. This is described in WO2015148863, the disclosure of which is hereby incorporated by reference.

### Herpes Simplex Virus 1 and 2

[1587] Herpesviridae are a family of viruses composed of linear double-stranded DNA genomes with 75-200 genes. For the purposes of gene editing, the most commonly studied family member is Herpes Simplex Virus-1 (HSV-1), a virus which has a distinct number of advantages over other viral vectors (reviewed in Vannuci et al. (2003)). Thus, in some embodiments, the viral vector is an HSV viral vector. In some embodiments, the HSV viral vector is HSV-1.

[1588] HSV-1 has a large genome of approximately 152 kb of double stranded DNA. This genome comprises of more than 80 genes, many of which can be replaced or removed, allowing a gene insert of between 30-150 kb. The viral vectors derived from HSV-1 are generally separated into 3 groups: replication-competant attenuated vectors, replication-incompetent recombinant vectors, and defective helper-dependent vectors known as amplicons. Gene transfer using HSV-1 as a vector has been demonstrated previously, for instance for the treatment of neuropathic pain (see, e.g., Wolfe et al. (2009) Gene Ther) and rheumatoid arthritis (see e.g., Burton et al. (2001) Stem Cells).

[1589] Thus, in some embodiments, the viral vector is an HSV viral vector. In some embodiments, the HSV viral vector is HSV-1. In some embodiments, the vector is used for delivery of one or more CRISPR components. It may be particularly useful for delivery of the Cas and one or more guide RNAs, for example 2 or more, 3 or more, or 4 or more guide RNAs. In some embodiments, the vector is therefore useful in a multiplex system. In some embodiments, this delivery is for the treatment of treatment of neuropathic pain or rheumatoid arthritis.

[1590] In some embodiments, the treatment, prophylaxis or diagnosis of HSV-1 (Herpes Simplex Virus 1) is provided. The target is preferably the UL19, UL30, UL48 or UL50 gene in HSV-1. This is described in WO2015153789, the disclosure of which is hereby incorporated by reference.

[1591] In other embodiments, the treatment, prophylaxis or diagnosis of HSV-2 (Herpes Simplex Virus 2) is provided. The target is preferably the UL19, UL30, UL48 or UL50 gene in HSV-2. This is described in WO2015153791, the disclosure of which is hereby incorporated by reference.

[1592] In some embodiments, the treatment, prophylaxis or diagnosis of Primary Open Angle Glaucoma (POAG) is provided. The target is preferably the MYOC gene. This is described in WO2015153780, the disclosure of which is hereby incorporated by reference.

### Adoptive Cell Therapies

[1593] The present invention also contemplates use of the CRISPR-Cas system described herein, e.g. Cas effector protein systems, to modify cells for adoptive therapies. Aspects of the invention accordingly involve the adoptive transfer of immune system cells, such as T cells, specific for selected antigens, such as tumor associated antigens (see Maus et al., 2014, Adoptive Immunotherapy for Cancer or Viruses, Annual Review of Immunology, Vol. 32: 189-225; Rosenberg and Restifo, 2015, Adoptive cell transfer as personalized immunotherapy for human cancer, Science Vol. 348 no. 6230 pp. 62-68; and, Restifo et al., 2015, Adoptive immunotherapy for cancer: harnessing the T cell response. Nat. Rev. Immunol. 12(4): 269-281; and Jenson and Riddell, 2014, Design and implementation of adoptive therapy with chimeric antigen receptor-modified T cells. Immunol Rev. 257(1): 127-144). Various strategies may for example be employed to genetically modify T cells by altering the specificity of the T cell receptor (TCR) for example by introducing new TCR α and β chains with selected peptide specificity (see U.S. Pat. No. 8,697,854; PCT Patent Publications: WO2003020763, WO2004033685, WO2004044004, WO2005114215, WO2006000830, WO2008038002, WO2008039818, WO2004074322, WO2005113595, WO2006125962, WO2013166321, WO2013039889, WO2014018863, WO2014083173; U.S. Pat. No. 8,088,379).

[1594] As an alternative to, or addition to, TCR modifications, chimeric antigen receptors (CARs) may be used in order to generate immunoresponsive cells, such as T cells, specific for selected targets, such as malignant cells, with a wide variety of receptor chimera constructs having been described (see U.S. Pat. Nos. 5,843,728; 5,851,828; 5,912,170; 6,004,811; 6,284,240; 6,392,013; 6,410,014; 6,753,162; 8,211,422; and, PCT Publication WO9215322). Alternative CAR constructs may be characterized as belonging to successive generations. First-generation CARs typically consist of a single-chain variable fragment of an antibody specific for an antigen, for example comprising a VL linked to a VH of a specific antibody, linked by a flexible linker, for example by a CD8α hinge domain and a CD8α transmembrane domain, to the transmembrane and intracellular signaling domains of either CD3 or FcRy (scFv-CD3 or scFv-FcRy; see U.S. Pat. Nos. 7,741,465; 5,912,172; 5,906,936). Second-generation CARs incorporate the intracellular domains of one or more costimulatory molecules, such as CD28, OX40 (CD134), or 4-1BB (CD137) within the endodomain (for example scFv-CD28/OX40/4-1BB-CD3; see U.S. Pat. Nos. 8,911,993; 8,916,381; 8,975,071; 9,101,584; 9,102,760; 9,102,761). Third-generation CARs include a combination of costimulatory endodomains, such a CD3ζ-chain, CD97, GDI 1a-CD18, CD2, ICOS, CD27, CD154, CDS, OX40, 4-1BB, or CD28 signaling domains (for example scFv-CD28-4-1BB-CD3t or scFv-CD28-OX40-CD3ζ; see U.S. Pat. Nos. 8,906,682; 8,399,645; 5,686,281; PCT Publication No. WO2014134165; PCT Publication No. WO2012079000). Alternatively, costimulation may be orchestrated by expressing CARs in antigen-specific T cells, chosen so as to be activated and expanded following engagement of their native αβTCR, for example by antigen on professional antigen-presenting cells, with attendant costimulation. In addition, additional engineered receptors may be provided on the immunoresponsive cells, for example to improve targeting of a T-cell attack and/or minimize side effects.

[1595] Alternative techniques may be used to transform target immunoresponsive cells, such as protoplast fusion, lipofection, transfection or electroporation. A wide variety of vectors may be used, such as retroviral vectors, lentiviral vectors, adenoviral vectors, adeno-associated viral vectors, plasmids or transposons, such as a Sleeping Beauty transposon (see U.S. Pat. Nos. 6,489,458; 7,148,203; 7,160,682; 7,985,739; 8,227,432), may be used to introduce CARs, for example using 2nd generation antigen-specific CARs signaling through CD3t and either CD28 or CD137. Viral vectors may for example include vectors based on HIV, SV40, EBV, HSV or BPV.

[1596] Cells that are targeted for transformation may for example include T cells, Natural Killer (NK) cells, cytotoxic T lymphocytes (CTL), regulatory T cells, human embryonic stem cells, tumor-infiltrating lymphocytes (TIL) or a pluripotent stem cell from which lymphoid cells may be differentiated. T cells expressing a desired CAR may for example be selected through co-culture with γ-irradiated activating and propagating cells (AaPC), which co-express the cancer antigen and co-stimulatory molecules. The engineered CAR T-cells may be expanded, for example by co-culture on AaPC in presence of soluble factors, such as IL-2 and IL-21. This expansion may for example be carried out so as to provide memory CAR+ T cells (which may for example be assayed by non-enzymatic digital array and/or multi-panel flow cytometry). In this way, CAR T cells may be provided that have specific cytotoxic activity against antigen-bearing tumors (optionally in conjunction with production of desired chemokines such as interferon-γ). CAR T cells of this kind may for example be used in animal models, for example to threat tumor xenografts.

[1597] Approaches such as the foregoing may be adapted to provide methods of treating and/or increasing survival of a subject having a disease, such as a neoplasia, for example by administering an effective amount of an immunoresponsive cell comprising an antigen recognizing receptor that binds a selected antigen, wherein the binding activates the immunoreponsive cell, thereby treating or preventing the disease (such as a neoplasia, a pathogen infection, an autoimmune disorder, or an allogeneic transplant reaction). Dosing in CAR T cell therapies may for example involve administration of from 106 to 109 cells/kg, with or without a course of lymphodepletion, for example with cyclophosphamide.

[1598] In one embodiment, the treatment can be administrated into patients undergoing an immunosuppressive treatment. The cells or population of cells, may be made resistant to at least one immunosuppressive agent due to the inactivation of a gene encoding a receptor for such immunosuppressive agent. Not being bound by a theory, the immunosuppressive treatment should help the selection and expansion of the immunoresponsive or T cells according to the invention within the patient.

[1599] The administration of the cells or population of cells according to the present invention may be carried out in any convenient manner, including by aerosol inhalation, injection, ingestion, transfusion, implantation or transplantation. The cells or population of cells may be administered to a patient subcutaneously, intradermally, intratumorally, intranodally, intramedullary, intramuscularly, by intravenous or intralymphatic injection, or intraperitoneally. In one embodiment, the cell compositions of the present invention are preferably administered by intravenous injection.

[1600] The administration of the cells or population of cells can consist of the administration of 104-109 cells per kg body weight, preferably 105 to 106 cells/kg body weight including all integer values of cell numbers within those ranges. Dosing in CAR T cell therapies may for example involve administration of from 106 to 109 cells/kg, with or without a course of lymphodepletion, for example with cyclophosphamide. The cells or population of cells can be administrated in one or more doses. In another embodiment, the effective amount of cells are administrated as a single dose. In another embodiment, the effective amount of cells are administrated as more than one dose over a period time. Timing of administration is within the judgment of managing physician and depends on the clinical condition of the patient. The cells or population of cells may be obtained from any source, such as a blood bank or a donor. While individual needs vary, determination of optimal ranges of effective amounts of a given cell type for a particular disease or conditions are within the skill of one in the art. An effective amount means an amount which provides a therapeutic or prophylactic benefit. The dosage administrated will be dependent upon the age, health and weight of the recipient, kind of concurrent treatment, if any, frequency of treatment and the nature of the effect desired.

[1601] In another embodiment, the effective amount of cells or composition comprising those cells are administrated parenterally. The administration can be an intravenous administration. The administration can be directly done by injection within a tumor.

[1602] To guard against possible adverse reactions, engineered immunoresponsive cells may be equipped with a transgenic safety switch, in the form of a transgene that renders the cells vulnerable to exposure to a specific signal. For example, the herpes simplex viral thymidine kinase (TK) gene may be used in this way, for example by introduction into allogeneic T lymphocytes used as donor lymphocyte infusions following stem cell transplantation (Greco, et al., Improving the safety of cell therapy with the TK-suicide gene. Front. Pharmacol. 2015; 6: 95). In such cells, administration of a nucleoside prodrug such as ganciclovir or acyclovir causes cell death. Alternative safety switch constructs include inducible caspase 9, for example triggered by administration of a small-molecule dimerizer that brings together two nonfunctional icasp9 molecules to form the active enzyme. A wide variety of alternative approaches to implementing cellular proliferation controls have been described (see U.S. Patent Publication No. 20130071414; PCT Patent Publication WO2011146862; PCT Patent Publication WO2014011987; PCT Patent Publication WO2013040371; Zhou et al. BLOOD, 2014, 123/25:3895-3905; Di Stasi et al., The New England Journal of Medicine 2011; 365:1673-1683; Sadelain M, The New England Journal of Medicine 2011; 365:1735-173; Ramos et al., Stem Cells 28(6):1107-15 (2010)).

[1603] In a further refinement of adoptive therapies, genome editing with a CRISPR-Cas system as described herein may be used to tailor immunoresponsive cells to alternative implementations, for example providing edited CAR T cells (see Poirot et al., 2015, Multiplex genome edited T-cell manufacturing platform for “off-the-shelf” adoptive T-cell immunotherapies, Cancer Res 75 (18): 3853). For example, immunoresponsive cells may be edited to delete expression of some or all of the class of HLA type II and/or type I molecules, or to knockout selected genes that may inhibit the desired immune response, such as the PD1 gene.

[1604] Cells may be edited using any CRISPR system and method of use thereof as described herein. CRISPR systems may be delivered to an immune cell by any method described herein. In preferred embodiments, cells are edited ex vivo and transferred to a subject in need thereof. Immunoresponsive cells, CAR T cells or any cells used for adoptive cell transfer may be edited. Editing may be performed to eliminate potential alloreactive T-cell receptors (TCR), disrupt the target of a chemotherapeutic agent, block an immune checkpoint, activate a T cell, and/or increase the differentiation and/or proliferation of functionally exhausted or dysfunctional CD8+ T-cells (see PCT Patent Publications: WO2013176915, WO2014059173, WO2014172606, WO2014184744, and WO2014191128). Editing may result in inactivation of a gene.

[1605] By inactivating a gene it is intended that the gene of interest is not expressed in a functional protein form. In a particular embodiment, the CRISPR system specifically catalyzes cleavage in one targeted gene thereby inactivating said targeted gene. The nucleic acid strand breaks caused are commonly repaired through the distinct mechanisms of homologous recombination or non-homologous end joining (NHEJ). However, NHEJ is an imperfect repair process that often results in changes to the DNA sequence at the site of the cleavage. Repair via non-homologous end joining (NHEJ) often results in small insertions or deletions (Indel) and can be used for the creation of specific gene knockouts. Cells in which a cleavage induced mutagenesis event has occurred can be identified and/or selected by well-known methods in the art.

[1606] T cell receptors (TCR) are cell surface receptors that participate in the activation of T cells in response to the presentation of antigen. The TCR is generally made from two chains, a and J3, which assemble to form a heterodimer and associates with the CD3-transducing subunits to form the T cell receptor complex present on the cell surface. Each a and 3 chain of the TCR consists of an immunoglobulin-like N-terminal variable (V) and constant (C) region, a hydrophobic transmembrane domain, and a short cytoplasmic region. As for immunoglobulin molecules, the variable region of the α and β chains are generated by V(D)J recombination, creating a large diversity of antigen specificities within the population of T cells. However, in contrast to immunoglobulins that recognize intact antigen, T cells are activated by processed peptide fragments in association with an MHC molecule, introducing an extra dimension to antigen recognition by T cells, known as MHC restriction. Recognition of MHC disparities between the donor and recipient through the T cell receptor leads to T cell proliferation and the potential development of graft versus host disease (GVHD). The inactivation of TCRα or TCRβ can result in the elimination of the TCR from the surface of T cells preventing recognition of alloantigen and thus GVHD. However, TCR disruption generally results in the elimination of the CD3 signaling component and alters the means of further T cell expansion.

[1607] Allogeneic cells are rapidly rejected by the host immune system. It has been demonstrated that, allogeneic leukocytes present in non-irradiated blood products will persist for no more than 5 to 6 days (Boni, Muranski et al. 2008 Blood 1; 112(12):4746-54). Thus, to prevent rejection of allogeneic cells, the host's immune system usually has to be suppressed to some extent. However, in the case of adoptive cell transfer the use of immunosuppressive drugs also have a detrimental effect on the introduced therapeutic T cells. Therefore, to effectively use an adoptive immunotherapy approach in these conditions, the introduced cells would need to be resistant to the immunosuppressive treatment. Thus, in a particular embodiment, the present invention further comprises a step of modifying T cells to make them resistant to an immunosuppressive agent, preferably by inactivating at least one gene encoding a target for an immunosuppressive agent. An immunosuppressive agent is an agent that suppresses immune function by one of several mechanisms of action. An immunosuppressive agent can be, but is not limited to a calcineurin inhibitor, a target of rapamycin, an interleukin-2 receptor α-chain blocker, an inhibitor of inosine monophosphate dehydrogenase, an inhibitor of dihydrofolic acid reductase, a corticosteroid or an immunosuppressive antimetabolite. The present invention allows conferring immunosuppressive resistance to T cells for immunotherapy by inactivating the target of the immunosuppressive agent in T cells. As non-limiting examples, targets for an immunosuppressive agent can be a receptor for an immunosuppressive agent such as: CD52, glucocorticoid receptor (GR), a FKBP family gene member and a cyclophilin family gene member.

[1608] Immune checkpoints are inhibitory pathways that slow down or stop immune reactions and prevent excessive tissue damage from uncontrolled activity of immune cells. In certain embodiments, the immune checkpoint targeted is the programmed death-1 (PD-1 or CD279) gene (PDCD1). In other embodiments, the immune checkpoint targeted is cytotoxic T-lymphocyte-associated antigen (CTLA-4). In additional embodiments, the immune checkpoint targeted is another member of the CD28 and CTLA4 Ig superfamily such as BTLA, LAG3, ICOS, PDL1 or KIR. In further additional embodiments, the immune checkpoint targeted is a member of the TNFR superfamily such as CD40, OX40, CD137, GITR, CD27 or TIM-3.

[1609] Additional immune checkpoints include Src homology 2 domain-containing protein tyrosine phosphatase 1 (SHP-1) (Watson H A, et al., SHP-1: the next checkpoint target for cancer immunotherapy? Biochem Soc Trans. 2016 Apr. 15; 44(2):356-62). SHP-1 is a widely expressed inhibitory protein tyrosine phosphatase (PTP). In T-cells, it is a negative regulator of antigen-dependent activation and proliferation. It is a cytosolic protein, and therefore not amenable to antibody-mediated therapies, but its role in activation and proliferation makes it an attractive target for genetic manipulation in adoptive transfer strategies, such as chimeric antigen receptor (CAR) T cells. Immune checkpoints may also include T cell immunoreceptor with Ig and ITIM domains (TIGIT/Vstm3/WUCAMIVSIG9) and VISTA (Le Mercier I, et al., (2015) Beyond CTLA-4 and PD-1, the generation Z of negative checkpoint regulators. Front. Immunol. 6:418).

[1610] WO2014172606 relates to the use of MT1 and/or MT1 inhibitors to increase proliferation and/or activity of exhausted CD8+ T-cells and to decrease CD8+ T-cell exhaustion (e.g., decrease functionally exhausted or unresponsive CD8+ immune cells). In certain embodiments, metallothioneins are targeted by gene editing in adoptively transferred T cells.

[1611] In certain embodiments, targets of gene editing may be at least one targeted locus involved in the expression of an immune checkpoint protein. Such targets may include, but are not limited to CTLA4, PPP2CA, PPP2CB, PTPN6, PTPN22, PDCD1, ICOS (CD278), PDL1, KIR, LAG3, HAVCR2, BTLA, CD160, TIGIT, CD96, CRTAM, LAIR1, SIGLEC7, SIGLEC9, CD244 (2B4), TNFRSF10B, TNFRSF10A, CASP8, CASP10, CASP3, CASP6, CASP7, FADD, FAS, TGFBRII, TGFRBRI, SMAD2, SMAD3, SMAD4, SMAD10, SKI, SKIL, TGIF1, IL10RA, IL10RB, HMOX2, IL6R, IL6ST, EIF2AK4, CSK, PAG1, SIT1, FOXP3, PRDM1, BATF, VISTA, GUCY1A2, GUCY1A3, GUCY1B2, GUCY1B3, MT1, MT2, CD40, OX40, CD137, GITR, CD27, SHP-1 or TIM-3. In preferred embodiments, the gene locus involved in the expression of PD-1 or CTLA-4 genes is targeted. In other preferred embodiments, combinations of genes are targeted, such as but not limited to PD-1 and TIGIT.

[1612] In other embodiments, at least two genes are edited. Pairs of genes may include, but are not limited to PD1 and TCRα, PD1 and TCRβ, CTLA-4 and TCRα, CTLA-4 and TCRβ, LAG3 and TCRα, LAG3 and TCRβ, Tim3 and TCRα, Tim3 and TCRβ, BTLA and TCRα, BTLA and TCRβ, BY55 and TCRα, BY55 and TCRβ, TIGIT and TCRα, TIGIT and TCRβ, B7H5 and TCRα, B7H5 and TCRβ, LAIR1 and TCRα, LAIR1 and TCR(3, SIGLEC10 and TCRα, SIGLEC10 and TCRβ, 2B4 and TCRα, 2B4 and TCRβ.

[1613] Whether prior to or after genetic modification of the T cells, the T cells can be activated and expanded generally using methods as described, for example, in U.S. Pat. Nos. 6,352,694; 6,534,055; 6,905,680; 5,858,358; 6,887,466; 6,905,681; 7,144,575; 7,232,566; 7,175,843; 5,883,223; 6,905,874; 6,797,514; 6,867,041; and 7,572,631. T cells can be expanded in vitro or in vivo.

[1614] The practice of the present invention employs, unless otherwise indicated, conventional techniques of immunology, biochemistry, chemistry, molecular biology, microbiology, cell biology, genomics and recombinant DNA, which are within the skill of the art. See MOLECULAR CLONING: A LABORATORY MANUAL, 2nd edition (1989) (Sambrook, Fritsch and Maniatis); MOLECULAR CLONING: A LABORATORY MANUAL, 4th edition (2012) (Green and Sambrook); CURRENT PROTOCOLS IN MOLECULAR BIOLOGY (1987) (F. M. Ausubel, et al. eds.); the series METHODS IN ENZYMOLOGY (Academic Press, Inc.); PCR 2: A PRACTICAL APPROACH (1995) (M. J. MacPherson, B. D. Hames and G. R. Taylor eds.); ANTIBODIES, A LABORATORY MANUAL (1988) (Harlow and Lane, eds.); ANTIBODIES A LABORATORY MANUAL, 2nd edition (2013) (E. A. Greenfield ed.); and ANIMAL CELL CULTURE (1987) (R. I. Freshney, ed.).

[1615] The practice of the present invention employs, unless otherwise indicated, conventional techniques for generation of genetically modified mice. See Marten H. Hofker and Jan van Deursen, TRANSGENIC MOUSE METHODS AND PROTOCOLS, 2nd edition (2011).

[1616] In some embodiments, the invention described herein relates to a method for adoptive immunotherapy, in which T cells are edited ex vivo by CRISPR to modulate at least one gene and subsequently administered to a patient in need thereof. In some embodiments, the CRISPR editing comprising knocking-out or knocking-down the expression of at least one target gene in the edited T cells. In some embodiments, in addition to modulating the target gene, the T cells are also edited ex vivo by CRISPR to (1) knock-in an exogenous gene encoding a chimeric antigen receptor (CAR) or a T-cell receptor (TCR), (2) knock-out or knock-down expression of an immune checkpoint receptor, (3) knock-out or knock-down expression of an endogenous TCR, (4) knock-out or knock-down expression of a human leukocyte antigen class I (HLA-I) proteins, and/or (5) knock-out or knock-down expression of an endogenous gene encoding an antigen targeted by an exogenous CAR or TCR.

[1617] In some embodiments, the T cells are contacted ex vivo with an adeno-associated virus (AAV) vector encoding a CRISPR effector protein, and a guide molecule comprising a guide sequence hybridizable to a target sequence, a tracr mate sequence, and a tracr sequence hybridizable to the tracr mate sequence. In some embodiments, the T cells are contacted ex vivo (e.g., by electroporation) with a ribonucleoprotein (RNP) comprising a CRISPR effector protein complexed with a guide molecule, wherein the guide molecule comprising a guide sequence hybridizable to a target sequence, a tracr mate sequence, and a tracr sequence hybridizable to the tracr mate sequence. See Rupp et al., Scientific Reports 7:737 (2017); Liu et al., Cell Research 27:154-157 (2017). In some embodiments, the T cells are contacted ex vivo (e.g., by electroporation) with an mRNA encoding a CRISPR effector protein, and a guide molecule comprising a guide sequence hybridizable to a target sequence, a tracr mate sequence, and a tracr sequence hybridizable to the tracr mate sequence. See Eyquem et al., Nature 543:113-117 (2017). In some embodiments, the T cells are not contacted ex vivo with a lentivirus or retrovirus vector.

[1618] In some embodiments, the method comprises editing T cells ex vivo by CRISPR to knock-in an exogenous gene encoding a CAR, thereby allowing the edited T cells to recognize cancer cells based on the expression of specific proteins located on the cell surface. In some embodiments, T cells are edited ex vivo by CRISPR to knock-in an exogenous gene encoding a TCR, thereby allowing the edited T cells to recognize proteins derived from either the surface or inside of the cancer cells. In some embodiments, the method comprising providing an exogenous CAR-encoding or TCR-encoding sequence as a donor sequence, which can be integrated by homology-directed repair (HDR) into a genomic locus targeted by a CRISPR guide sequence. In some embodiments, targeting the exogenous CAR or TCR to an endogenous TCR a constant (TRAC) locus can reduce tonic CAR signaling and facilitate effective internalization and re-expression of the CAR following single or repeated exposure to antigen, thereby delaying effector T-cell differentiation and exhaustion. See Eyquem et al., Nature 543:113-117 (2017).

[1619] In some embodiments, the method comprises editing T cells ex vivo by CRISPR to block one or more immune checkpoint receptors to reduce immunosuppression by cancer cells. In some embodiments, T cells are edited ex vivo by CRISPR to knock-out or knock-down an endogenous gene involved in the programmed death-1 (PD-1) signaling pathway, such as PD-1 and PD-L1. In some embodiments, T cells are edited ex vivo by CRISPR to mutate the Pdcd1 locus or the CD274 locus. In some embodiments, T cells are edited ex vivo by CRISPR using one or more guide sequences targeting the first exon of PD-1. See Rupp et al., Scientific Reports 7:737 (2017); Liu et al., Cell Research 27:154-157 (2017).

[1620] In some embodiments, the method comprises editing T cells ex vivo by CRISPR to eliminate potential alloreactive TCRs to allow allogeneic adoptive transfer. In some embodiments, T cells are edited ex vivo by CRISPR to knock-out or knock-down an endogenous gene encoding a TCR (e.g., an αβ TCR) to avoid graft-versus-host-disease (GVHD). In some embodiments, T cells are edited ex vivo by CRISPR to mutate the TRAC locus. In some embodiments, T cells are edited ex vivo by CRISPR using one or more guide sequences targeting the first exon of TRAC. See Liu et al., Cell Research 27:154-157 (2017). In some embodiments, the method comprises use of CRISPR to knock-in an exogenous gene encoding a CAR or a TCR into the TRAC locus, while simultaneously knocking-out the endogenous TCR (e.g., with a donor sequence encoding a self-cleaving P2A peptide following the CAR cDNA). See Eyquem et al., Nature 543:113-117 (2017). In some embodiments, the exogenous gene comprises a promoter-less CAR-encoding or TCR-encoding sequence which is inserted operably downstream of an endogenous TCR promoter.

[1621] In some embodiments, the method comprises editing T cells ex vivo by CRISPR to knock-out or knock-down an endogenous gene encoding an HLA-I protein to minimize immunogenicity of the edited T cells. In some embodiments, T cells are edited ex vivo by CRISPR to mutate the beta-2 microglobulin (B2M) locus. In some embodiments, T cells are edited ex vivo by CRISPR using one or more guide sequences targeting the first exon of B2M. See Liu et al., Cell Research 27:154-157 (2017). In some embodiments, the method comprises use of CRISPR to knock-in an exogenous gene encoding a CAR or a TCR into the B2M locus, while simultaneously knocking-out the endogenous B2M (e.g., with a donor sequence encoding a self-cleaving P2A peptide following the CAR cDNA). See Eyquem et al., Nature 543:113-117 (2017). In some embodiments, the exogenous gene comprises a promoter-less CAR-encoding or TCR-encoding sequence which is inserted operably downstream of an endogenous B2M promoter.

[1622] In some embodiments, the method comprises editing T cells ex vivo by CRISPR to knock-out or knock-down an endogenous gene encoding an antigen targeted by an exogenous CAR or TCR. In some embodiments, the T cells are edited ex vivo by CRISPR to knock-out or knock-down the expression of a tumor antigen selected from human telomerase reverse transcriptase (hTERT), survivin, mouse double minute 2 homolog (MDM2), cytochrome P450 1B 1 (CYP1B), HER2/neu, Wilms' tumor gene 1 (WT1), livin, alphafetoprotein (AFP), carcinoembryonic antigen (CEA), mucin 16 (MUC16), MUC1, prostate-specific membrane antigen (PSMA), p53 or cyclin (DI) (see WO2016/011210). In some embodiments, the T cells are edited ex vivo by CRISPR to knock-out or knock-down the expression of an antigen selected from B cell maturation antigen (BCMA), transmembrane activator and CAML Interactor (TACI), or B-cell activating factor receptor (BAFF-R), CD38, CD138, CS-1, CD33, CD26, CD30, CD53, CD92, CD100, CD148, CD150, CD200, CD261, CD262, or CD362 (see WO2017/011804).

[1623] Gene Drives

[1624] The present invention also contemplates use of the CRISPR-Cas system described herein to provide RNA-guided gene drives, for example in systems analogous to gene drives described in PCT Patent Publication WO 2015/105928. Systems of this kind may for example provide methods for altering eukaryotic germline cells, by introducing into the germline cell a nucleic acid sequence encoding an RNA-guided DNA nuclease and one or more guide RNAs. The guide RNAs may be designed to be complementary to one or more target locations on genomic DNA of the germline cell. The nucleic acid sequence encoding the RNA guided DNA nuclease and the nucleic acid sequence encoding the guide RNAs may be provided on constructs between flanking sequences, with promoters arranged such that the germline cell may express the RNA guided DNA nuclease and the guide RNAs, together with any desired cargo-encoding sequences that are also situated between the flanking sequences. The flanking sequences will typically include a sequence which is identical to a corresponding sequence on a selected target chromosome, so that the flanking sequences work with the components encoded by the construct to facilitate insertion of the foreign nucleic acid construct sequences into genomic DNA at a target cut site by mechanisms such as homologous recombination, to render the germline cell homozygous for the foreign nucleic acid sequence. In this way, gene-drive systems are capable of introgressing desired cargo genes throughout a breeding population (Gantz et al., 2015, Highly efficient Cas9-mediated gene drive for population modification of the malaria vector mosquito Anopheles stephensi, PNAS 2015, published ahead of print Nov. 23, 2015, doi:10.1073/pnas.1521077112; Esvelt et al., 2014, Concerning RNA-guided gene drives for the alteration of wild populations eLife 2014; 3:e03401). In select embodiments, target sequences may be selected which have few potential off-target sites in a genome. Targeting multiple sites within a target locus, using multiple guide RNAs, may increase the cutting frequency and hinder the evolution of drive resistant alleles. Truncated guide RNAs may reduce off-target cutting. Paired nickases may be used instead of a single nuclease, to further increase specificity. Gene drive constructs may include cargo sequences encoding transcriptional regulators, for example to activate homologous recombination genes and/or repress non-homologous end-joining. Target sites may be chosen within an essential gene, so that non-homologous end-joining events may cause lethality rather than creating a drive-resistant allele. The gene drive constructs can be engineered to function in a range of hosts at a range of temperatures (Cho et al. 2013, Rapid and Tunable Control of Protein Stability in Caenorhabditis elegans Using a Small Molecule, PLoS ONE 8(8): e72393. doi:10.1371/journal.pone.0072393).

### Xenotransplantation

[1625] The present invention also contemplates use of the CRISPR-Cas system described herein to provide RNA-guided DNA nucleases adapted to be used to provide modified tissues for transplantation. For example, RNA-guided DNA nucleases may be used to knockout, knockdown or disrupt selected genes in an animal, such as a transgenic pig (such as the human heme oxygenase-1 transgenic pig line), for example by disrupting expression of genes that encode epitopes recognized by the human immune system, i.e. xenoantigen genes. Candidate porcine genes for disruption may for example include α(1,3)-galactosyltransferase and cytidine monophosphate-N-acetylneuraminic acid hydroxylase genes (see PCT Patent Publication WO 2014/066505). In addition, genes encoding endogenous retroviruses may be disrupted, for example the genes encoding all porcine endogenous retroviruses (see Yang et al., 2015, Genome-wide inactivation of porcine endogenous retroviruses (PERVs), Science 27 Nov. 2015: Vol. 350 no. 6264 pp. 1101-1104). In addition, RNA-guided DNA nucleases may be used to target a site for integration of additional genes in xenotransplant donor animals, such as a human CD55 gene to improve protection against hyperacute rejection.

### General Gene Therapy Considerations

[1626] Examples of disease-associated genes and polynucleotides amd disease specific information is available from McKusick-Nathans Institute of Genetic Medicine, Johns Hopkins University (Baltimore, Md.) and National Center for Biotechnology Information, National Library of Medicine (Bethesda, Md.), available on the World Wide Web.

[1627] Mutations in these genes and pathways can result in production of improper proteins or proteins in improper amounts which affect function. Further examples of genes, diseases and proteins are hereby incorporated by reference from U.S. Provisional application 61/736,527 filed Dec. 12, 2012. Such genes, proteins and pathways may be the target polynucleotide of a CRISPR complex of the present invention. Examples of disease-associated genes and polynucleotides are listed in Tables 20 and 21 Examples of signaling biochemical pathway-associated genes and polynucleotides are listed in Table 22.

TABLE 20

| DISEASE/ | |
|---|---|
| DISORDERS | GENE(S) |
| Neoplasia | PTEN; ATM; ATR; EGFR; ERBB2; ERBB3; |
| | ERBB4; Notch1; Notch2; Notch3; Notch4; |
| | AKT; AKT2; AKT3; HIF; HIF1a; HIF3a; |
| | Met; HRG; Bcl2; PPAR alpha; PPAR gamma; |
| | WT1 (Wilms Tumor); FGF Receptor Family |
| | members (5 members: 1, 2, 3, 4, 5); |
| | CDKN2a; APC; RB (retinoblastoma); |
| | MEN1; VHL; BRCA1; BRCA2; AR |
| | (Androgen Receptor); TSG101; IGF; |
| | IGF Receptor; Igf1 (4 variants); Igf2 |
| | (3 variants); Igf 1 Receptor; Igf 2 Receptor; |
| | Bax; Bcl2; caspases family (9 members: |
| | 1, 2, 3, 4, 6, 7, 8, 9, 12); Kras; Apc |
| Age-related | Abcr; Ccl2; Cc2; cp (ceruloplasmin); |
| Macular | Timp3; cathepsinD; |
| Degeneration | Vldlr; Ccr2 |
| Schizophrenia | Neuregulin1 (Nrg1); Erb4 |
| | (receptor for Neuregulin); |
| | Complexinl (Cplx1); Tph1 Tryptophan |
| | hydroxylase; Tph2 Tryptophan hydroxylase 2; |
| | Neurexin 1; GSK3; GSK3a; GSK3b |
| Disorders | 5-HTT (Slc6a4); COMT; DRD (Drd1a); |
| | SLC6A3; DAOA; DTNBP1; Dao (Dao1) |
| Trinucleotide | HTT (Huntington's Dx); |
| Repeat | SBMA/SMAX1/AR (Kennedy's |
| Disorders | Dx); FWX25 (Friedrich's Ataxia); |
| | ATX3 (Machado-Joseph's Dx); |
| | ATXN1 and ATXN2 (spinocerebellar |
| | ataxias); DMPK (myotonic dystrophy); |
| | Atrophin-1 and Atn1 |
| | (DRPLA Dx); CBP (Creb-BP-global instability); |
| | VLDLR (Alzheimer's); Atxn7; Atxn10 |
| Fragile X | FMR2; FXR1; FXR2; mGLUR5 |
| Syndrome | |
| Secretase Related | APH-1 (alpha and beta); Presenilin (Psen1); |
| Disorders | nicastrin (Ncstn); PEN-2 |
| Others | Nos1; Parp1; Nat1; Nat2 |
| Prion-related | Prp |
| disorders | |
| ALS | SOD1; ALS2; STEX; FUS; TARDBP; VEGF |
| | (VEGF-a; VEGF-b; VEGF-c) |
| Drug addiction | Prkce (alcohol); Drd2; Drd4; ABAT |
| | (alcohol); GRIA2; Grm5; Grin1; Htr1b; |
| | Grin2a; Drd3; Pdyn; Gria1 (alcohol) |
| Autism | Mecp2; BZRAP1; MDGA2; |
| | Sema5A; Neurexin 1; Fragile X |
| | (FMR2 (AFF2); FXR1; FXR2; Mglur5) |
| Alzheimer's | E1; CHIP; UCH; UBB; Tau; LRP; |
| Disease | PICALM; Clusterin; PS1; |
| | SORL1; CR1; Vldlr; Uba1; Uba3; CHIP28 |
| | (Aqp1, Aquaporin 1); Uchl1; Uchl3; APP |
| Inflammation | IL-10; IL-1 (IL-1a; IL-1b); IL-13; |
| | IL-17 (IL-17a (CTLA8); IL- |
| | 17b; IL-17c; IL-17d; IL-17f); |
| | II-23; Cx3cr1; ptpn22; TNFa; |
| | NOD2/CARD15 for IBD; IL-6; IL-12 |
| | (IL-12a; IL-12b); CTLA4; Cx3cl1 |
| Parkinson's Disease | x-Synuclein; DJ-1; LRRK2; Parkin; PINK1 |

TABLE 21

| | |
|---|---|
| Blood and | Anemia (CDAN1, CDA1, RPS19, DBA, |
| coagulation | PKLR, PK1, NT5C3, UMPH1, |
| diseases | PSN1, RHAG, RH50A, NRAMP2, |
| and disorders | SPTB, ALAS2, ANH1, ASB, |
| | ABCB7, ABC7, ASAT); Bare lymphocyte |
| | syndrome (TAPBP, TPSN, |
| | TAP2, ABCB3, PSF2, RING11, |
| | MHC2TA, C2TA, RFX5, RFXAP, |
| | RFX5), Bleeding disorders (TBXA2R, |
| | P2RX1, P2X1); Factor H and |
| | factor H-like 1 (HF1, CFH, HUS); Factor |
| | V and factor VIII (MCFD2); |
| | Factor VII deficiency (F7); Factor X |
| | deficiency (F10); Factor XI |
| | deficiency (F11); Factor XII deficiency |
| | (F12, HAF); Factor XIIIA |
| | deficiency (F13A1, F13A); Factor XIIIB |
| | deficiency (F13B); Fanconi |
| | anemia (FANCA, FACA, FA1, FA, |
| | FAA, FAAP95, FAAP90, FLJ34064, |
| | FANCB, FANCC, FACC, BRCA2, |
| | FANCD1, FANCD2, FANCD, |
| | FACD, FAD, FANCE, FACE, FANCF, |
| | XRCC9, FANCG, BRIP1, |
| | BACH1, FANCJ, PHF9, FANCL, |
| | FANCM, KIAA1596); |
| | Hemophagocytic lymphohistiocytosis |
| | disorders (PRF1, HPLH2, |
| | UNC13D, MUNC13-4, HPLH3, HLH3, |
| | FHL3); Hemophilia A (F8, F8C, |
| | HEMA); Hemophilia B (F9, HEMB), |
| | Hemorrhagic disorders (PI, ATT, |
| | F5); Leukocyde deficiencies and |
| | disorders (ITGB2, CD18, LCAMB, |
| | LAD, EIF2B1, EIF2BA, EIF2B2, EIF2B3, |
| | EIF2B5, LVWM, CACH, |
| | CLE, EIF2B4); Sickle cell anemia (HBB); |
| | Thalassemia (HBA2, HBB, |
| | HBD, LCRB, HBA1). |
| Cell dysregulation | B-cell non-Hodgkin lymphoma (BCL7A, |
| and oncology | BCL7); Leukemia (TAL1, |
| diseases | TCL5, SCL, TAL2, FLT3, NBS1, NBS, |
| and disorders | ZNFN1A1, IK1, LYF1, |
| | HOXD4, HOX4B, BCR, CML, PHL, |
| | ALL, ARNT, KRAS2, RASK2, |
| | GMPS, AF10, ARHGEF12, LARG, |
| | KIAA0382, CALM, CLTH, |
| | CEBPA, CEBP, CHIC2, BTL, FLT3, |
| | KIT, PBT, LPP, NPM1, NUP214, |
| | D9546E, CAN, CAIN, RUNX1, CBFA2, |
| | AML1, WHSC1L1, NSD3, |
| | FLT3, AF1Q, NPM1, NUMA1, ZNF145, |
| | PLZF, PML, MYL, STAT5B, |
| | AF10, CALM, CLTH, ARL11, ARLTS1, |
| | P2RX7, P2X7, BCR, CML, |
| | PHL, ALL, GRAF, NF1, VRNF, WSS, |
| | NFNS, PTPN11, PTP2C, SHP2, |
| | NS1, BCL2, CCND1, PRAD1, BCL1, |
| | TCRA, GATA1, GF1, ERYF1, |
| | NFE1, ABL1, NQO1, DIA4, NMOR1, |
| | NUP214, D9S46E, CAN, CAIN). |
| Inflammation | AIDS (KIR3DL1, NKAT3, NKB1, AMB11, |
| and | KIR3DS1, IFNG, CXCL12, |
| immune related | SDF1); Autoimmune lymphoproliferative |
| diseases and | syndrome (TNFRSF6, APT1, |
| disorders | FAS, CD95, ALPS1A); Combined |
| | immunodeficiency, (IL2RG, |
| | SCIDX1, SCIDX, IMD4); HIV-1 (CCL5, |
| | SCYA5, D17S136E, TCP228), |
| | HIV susceptibility or infection (IL10, |
| | CSIF, CMKBR2, CCR2, |
| | CMKBR5, CCCKR5 (CCR5)); |
| | Immunodeficiencies (CD3E, CD3G, |
| | AICDA, AID, HIGM2, TNFRSF5, |
| | CD40, UNG, DGU, HIGM4, |
| | TNFSF5, CD40LG, HIGM1, IGM, |
| | FOXP3, IPEX, AIID, XPID, PIDX, |
| | TNFRSF14B, TACI); Inflammation |
| | (IL-10, IL-1 (IL-1a, IL-1b), IL-13, |
| | IL-17 (IL-17a (CTLA8), IL-17b, IL-17c, |
| | IL-17d, IL-17f), II-23, Cx3cr1, |
| | ptpn22, TNFa, NOD2/CARD15 for IBD, |
| | IL-6, IL-12 (IL-12a, IL-12b), |
| | CTLA4, Cx3c11); Severe combined |
| | immunodeficiencies (SCIDs)(JAK3, |
| | JAKL, DCLRE1C, ARTEMIS, SCIDA, |
| | RAG1, RAG2, ADA, PTPRC, |
| | CD45, LCA, IL7R, CD3D, T3D, IL2RG, |
| | SCIDX1, SCIDX, IMD4). |
| Metabolic, liver, | Amyloid neuropathy (TTR, PALB); |
| kidney | Amyloidosis (APOA1, APP, AAA, |
| and protein | CVAP, AD1, GSN, FGA, LYZ, TTR, |
| diseases | PALB); Cirrhosis (KRT18, KRT8, |
| and disorders | CIRH1A, NAIC, TEX292, KIAA1988); |
| | Cystic fibrosis (CFTR, ABCC7, |
| | CF, MRP7); Glycogen storage diseases |
| | (SLC2A2, GLUT2, G6PC, |
| | G6PT, G6PT1, GAA, LAMP2, |
| | LAMPB, AGL, GDE, GBE1, GYS2, |
| | PYGL, PFKM); Hepatic adenoma, |
| | 142330 (TCF1, HNF1A, MODY3), |
| | Hepatic failure, early onset, and |
| | neurologic disorder (SCOD1, SCO1), |
| | Hepatic lipase deficiency (LIPC), |
| | Hepatoblastoma, cancer and |
| | carcinomas (CTNNB1, PDGFRL, |
| | PDGRL, PRLTS, AXIN1, AXIN, |
| | CTNNB1, TP53, P53, LFS1, IGF2R, |
| | MPRI, MET, CASP8, MCH5; |
| | Medullary cystic kidney disease |
| | (UMOD, HNFJ, FJHN, MCKD2, |
| | ADMCKD2); Phenylketonuria (PAH, |
| | PKU1, QDPR, DHPR, PTS); |
| | Polycystic kidney and hepatic disease |
| | (FCYT, PKHD1, ARPKD, PKD1, |
| | PKD2, PKD4, PKDTS, PRKCSH, |
| | G19P1, PCLD, SEC63). |
| Muscular/Skeletal | Becker muscular dystrophy (DMD, |
| diseases and | BMD, MYF6), Duchenne Muscular |
| disorders | Dystrophy (DMD, BMD); Emery-Dreifuss |
| | muscular dystrophy (LMNA, |
| | LMN1, EMD2, FPLD, CMD1A, HGPS, |
| | LGMD1B, LMNA, LMN1, |
| | EMD2, FPLD, CMD1A); |
| | Facioscapulohumeral muscular dystrophy |
| | (FSHMD1A, FSHD1A); Muscular |
| | dystrophy (FKRP, MDC1C, |
| | LGMD2I, LAMA2, LAMM, LARGE, |
| | KIAA0609, MDC1D, FCMD, |
| | TTID, MYOT, CAPN3, CANP3, DYSF, |
| | LGMD2B, SGCG, LGMD2C, |
| | DMDA1, SCG3, SGCA, ADL, DAG2, |
| | LGMD2D, DMDA2, SGCB, |
| | LGMD2E, SGCD, SGD, LGMD2F, |
| | CMD1L, TCAP, LGMD2G, |
| | CMD1N, TRIM32, HT2A, LGMD2H, |
| | FKRP, MDC1C, LGMD2I, TTN, |
| | CMD1G, TMD, LGMD2J, POMT1, |
| | CAV3, LGMD1C, SEPN1, SELN, |
| | RSMD1, PLEC1, PLTN, EBS1); |
| | Osteopetrosis (LRP5, BMND1, LRP7, |
| | LR3, OPPG, VBCH2, CLCN7, CLC7, |
| | OPTA2, OSTM1, GL, TCIRG1, |
| | TIRC7, OC116, OPTB1); Muscular |
| | atrophy (VAPB, VAPC, ALS8, |
| | SMN1, SMA1, SMA2, SMA3, SMA4, |
| | BSCL2, SPG17, GARS, SMAD1, |
| | CMT2D, HEXB, IGHMBP2, SMUBP2, |
| | CATF1, SMARD1). |
| Neurological and | ALS (SOD1, ALS2, STEX, FUS, TARDBP, |
| neuronal | VEGF (VEGF-a, VEGF-b, |
| diseases and | VEGF-c); Alzheimer disease (APP, AAA, |
| disorders | CVAP, AD1, APOE, AD2, |
| | PSEN2, AD4, STM2, APBB2, FE65L1, |
| | NOS3, PLAU, URK, ACE, |
| | DCP1, ACE1, MPO, PACIP1, PAXIP1L, |
| | PTIP, A2M, BLMH, BMH, |
| | PSEN1, AD3); Autism (Mecp2, BZRAP1, |
| | MDGA2, Sema5A, Neurexin |
| | 1, GLO1, MECP2, RTT, PPMX, MRX16, |
| | MRX79, NLGN3, NLGN4, |
| | KIAA1260, AUTSX2); Fragile X |
| | Syndrome (FMR2, FXR1, FXR2, |
| | mGLUR5); Huntington's disease and |
| | disease like disorders (HD, IT15, |
| | PRNP, PRIP, JPH3, JP3, HDL2, |
| | TBP, SCA17); Parkinson disease |
| | (NR4A2, NURR1, NOT, TINUR, |
| | SNCAIP, TBP, SCA17, SNCA, |
| | NACP, PARK1, PARK4, DJ1, PARK7, |
| | LRRK2, PARK8, PINK1, |
| | PARK6, UCHL1, PARK5, SNCA, |
| | NACP, PARK1, PARK4, PRKN, |
| | PARK2, PDJ, DBH, NDUFV2); |
| | Rett syndrome (MECP2, RTT, PPMX, |
| | MRX16, MRX79, CDKL5, STK9, |
| | MECP2, RTT, PPMX, MRX16, |
| | MRX79, x-Synuclein, DJ-1); |
| | Schizophrenia (Neuregulin1 (Nrg1), Erb4 |
| | (receptor for Neuregulin), Complexin1 |
| | (Cplx1), Tph1 Tryptophan |
| | hydroxylase, Tph2, Tryptophan |
| | hydroxylase 2, Neurexin 1, GSK3, |
| | GSK3a, GSK3b, 5-HTT (Slc6a4), |
| | COMT, DRD (Drd1a), SLC6A3, |
| | DAOA, DTNBP1, Dao (Dao1)); |
| | Secretase Related Disorders (APH-1 |
| | (alpha and beta), Presenilin (Psen1), |
| | nicastrin, (Ncstn), PEN-2, Nos1, |
| | Parp1, Nat1, Nat2); Trinucleotide |
| | Repeat Disorders (HTT (Huntington's |
| | Dx), SBMA/SMAX1/AR (Kennedy's |
| | Dx), FWX25 (Friedrich's |
| | Ataxia), ATX3 (Machado-Joseph's |
| | Dx), ATXN1 and ATXN2 |
| | (spinocerebellar ataxias), DMPK |
| | (myotonic dystrophy), Atrophin-1 and |
| | Atn1 (DRPLA Dx), CBP (Creb-BP-global |
| | instability), VLDLR |
| | (Alzheimer's), Atxn7, Atxn10). |
| Occular | Age-related macular degeneration (Abcr, |
| diseases and | Ccl2, Cc2, cp (ceruloplasmin), |
| disorders | Timp3, cathepsinD, Vldlr, Ccr2); |
| | Cataract (CRYAA, CRYA1, CRYBB2, |
| | CRYB2, PITX3, BFSP2, CP49, CP47, |
| | CRYAA, CRYA1, PAX6, AN2, |
| | MGDA, CRYBA1, CRYB1, CRYGC, |
| | CRYG3, CCL, LIM2, MP19, |
| | CRYGD, CRYG4, BFSP2, CP49, CP47, |
| | HSF4, CTM, HSF4, CTM, |
| | MIP, AQP0, CRYAB, CRYA2, CTPP2, |
| | CRYBB1, CRYGD, CRYG4, |
| | CRYBB2, CRYB2, CRYGC, CRYG3, |
| | CCL, CRYAA, CRYA1, GJA8, |
| | CX50, CAE1, GJA3, CX46, CZP3, |
| | CAE3, CCM1, CAM, KRIT1); |
| | Corneal clouding and dystrophy |
| | (APOA1, TGFBI, CSD2, CDGG1, |
| | CSD, BIGH3, CDG2, TACSTD2, |
| | TROP2, M1S1, VSX1, RINX, PPCD, |
| | PPD, KTCN, COL8A2, FECD, PPCD2, |
| | PIP5K3, CFD); Cornea plana |
| | congenital (KERA, CNA2); Glaucoma |
| | (MYOC, TIGR, GLC1A, JOAG, |
| | GPOA, OPTN, GLC1E, FIP2, HYPL, |
| | NRP, CYP1B1, GLC3A, OPA1, |
| | NTG, NPG, CYP1B1, GLC3A); Leber |
| | congenital amaurosis (CRB1, |
| | RP12, CRX, CORD2, CRD, RPGRIP1, |
| | LCA6, CORD9, RPE65, RP20, |
| | AIPL1, LCA4, GUCY2D, GUC2D, |
| | LCA1, CORD6, RDH12, LCA3); |
| | Macular dystrophy (ELOVL4, ADMD, |
| | STGD2, STGD3, RDS, RP7, |
| | PRPH2, PRPH, AVMD, AOFMD, VMD2). |

TABLE 22

| CELLULAR | |
|---|---|
| FUNCTION | GENES |
| PI3K/AKT | PRKCE; ITGAM; ITGA5; IRAK1; |
| Signaling | PRKAA2; EIF2AK2; |
| | PTEN; EIF4E; PRKCZ; GRK6; |
| | MAPK1; TSC1; PLK1; |
| | AKT2; IKBKB; PIK3CA; CDK8; |
| | CDKN1B; NFKB2; BCL2; |
| | PIK3CB; PPP2R1A; MAPK8; |
| | BCL2L1; MAPK3; TSC2; |
| | ITGA1; KRAS; EIF4EBP1; |
| | RELA; PRKCD; NOS3; |
| | PRKAA1; MAPK9; CDK2; |
| | PPP2CA; PIM1; ITGB7; |
| | YWHAZ; ILK; TP53; RAF1; |
| | IKBKG; RELB; DYRK1A; |
| | CDKN1A; ITGB1; MAP2K2; |
| | JAK1; AKT1; JAK2; PIK3R1; |
| | CHUK; PDPK1; PPP2R5C; |
| | CTNNB1; MAP2K1; NFKB1; |
| | PAK3; ITGB3; CCND1; GSK3A; |
| | FRAP1; SFN; ITGA2; |
| | TTK; CSNK1A1; BRAF; GSK3B; |
| | AKT3; FOXO1; SGK; |
| | HSP90AA1; RPS6KB1 |
| ERK/MAPK | PRKCE; ITGAM; ITGA5; |
| Signaling | HSPB1; IRAK1; PRKAA2; |
| | EIF2AK2; RAC1; RAP1A; |
| | TLN1; EIF4E; ELK1; GRK6; |
| | MAPK1; RAC2; PLK1; AKT2; |
| | PIK3CA; CDK8; CREB1; |
| | PRKCI; PTK2; FOS; RPS6KA4; |
| | PIK3CB; PPP2R1A; |
| | PIK3C3; MAPK8; MAPK3; |
| | ITGA1; ETS1; KRAS; MYCN; |
| | EIF4EBP1; PPARG; PRKCD; |
| | PRKAA1; MAPK9; SRC; |
| | CDK2; PPP2CA; PIM1; PIK3C2A; |
| | ITGB7; YWHAZ; |
| | PPP1CC; KSR1; PXN; RAF1; |
| | FYN; DYRK1A; ITGB1; |
| | MAP2K2; PAK4; PIK3R1; STAT3; |
| | PPP2R5C; MAP2K1; |
| | PAK3; ITGB3; ESR1; ITGA2; |
| | MYC; TTK; CSNK1A1; |
| | CRKL; BRAF; ATF4; PRKCA; |
| | SRF; STAT1; SGK |
| Glucocorticoid | RAC1; TAF4B; EP300; SMAD2; |
| Receptor | TRAF6; PCAF; ELK1; |
| Signaling | MAPK1; SMAD3; AKT2; |
| | IKBKB; NCOR2; UBE2I; |
| | PIK3CA; CREB1; FOS; HSPA5; |
| | NFKB2; BCL2; |
| | MAP3K14; STAT5B; PIK3CB; |
| | PIK3C3; MAPK8; BCL2L1; |
| | MAPK3; TSC22D3; MAPK10; |
| | NRIP1; KRAS; MAPK13; |
| | RELA; STAT5A; MAPK9; |
| | NOS2A; PBX1; NR3C1; |
| | PIK3C2A; CDKN1C; TRAF2; |
| | SERPINE1; NCOA3; |
| | MAPK14; TNF; RAF1; IKBKG; |
| | MAP3K7; CREBBP; |
| | CDKN1A; MAP2K2; JAK1; IL8; |
| | NCOA2; AKT1; JAK2; |
| | PIK3R1; CHUK; STAT3; MAP2K1; |
| | NFKB1; TGFBR1; |
| | ESR1; SMAD4; CEBPB; JUN; AR; |
| | AKT3; CCL2; MMP1; |
| | STAT1; IL6; HSP90AA1 |
| Axonal Guidance | PRKCE; ITGAM; ROCK1; ITGA5; |
| Signaling | CXCR4; ADAM12; |
| | IGF1; RAC1; RAP1A; EIF4E; |
| | PRKCZ; NRP1; NTRK2; |
| | ARHGEF7; SMO; ROCK2; |
| | MAPK1; PGF; RAC2; |
| | PTPN11; GNAS; AKT2; PIK3CA; |
| | ERBB2; PRKCI; PTK2; |
| | CFL1; GNAQ; PIK3CB; CXCL12; |
| | PIK3C3; WNT11; |
| | PRKD1; GNB2L1; ABL1; MAPK3; |
| | ITGA1; KRAS; RHOA; |
| | PRKCD; PIK3C2A; ITGB7; GLI2; |
| | PXN; VASP; RAF1; |
| | FYN; ITGB1; MAP2K2; PAK4; |
| | ADAM17; AKT1; PIK3R1; |
| | GLI1; WNT5A; ADAM10; |
| | MAP2K1; PAK3; ITGB3; |
| | CDC42; VEGFA; ITGA2; EPHA8; |
| | CRKL; RND1; GSK3B; |
| | AKT3; PRKCA |
| Ephrin Receptor | PRKCE; ITGAM; ROCK1; |
| Signaling | ITGA5; CXCR4; IRAK1; |
| | PRKAA2; EIF2AK2; RAC1; |
| | RAP1A; GRK6; ROCK2; |
| | MAPK1; PGF; RAC2; PTPN11; |
| | GNAS; PLK1; AKT2; |
| | DOK1; CDK8; CREB1; PTK2; |
| | CFL1; GNAQ; MAP3K14; |
| | CXCL12; MAPK8; GNB2L1; |
| | ABL1; MAPK3; ITGA1; |
| | KRAS; RHOA; PRKCD; PRKAA1; |
| | MAPK9; SRC; CDK2; |
| | PIM1; ITGB7; PXN; RAF1; |
| | FYN; DYRK1A; ITGB1; |
| | MAP2K2; PAK4; AKT1; |
| | JAK2; STAT3; ADAM10; |
| | MAP2K1; PAK3; ITGB3; |
| | CDC42; VEGFA; ITGA2; |
| | EPHA8; TTK; CSNK1A1; CRKL; |
| | BRAF; PTPN13; ATF4; |
| | AKT3; SGK |
| Actin | ACTN4; PRKCE; ITGAM; |
| Cytoskeleton | ROCK1; ITGA5; IRAK1; |
| Signaling | PRKAA2; EIF2AK2; RAC1; |
| | INS; ARHGEF7; GRK6; |
| | ROCK2; MAPK1; RAC2; PLK1; |
| | AKT2; PIK3CA; CDK8; |
| | PTK2; CFL1; PIK3CB; MYH9; |
| | DIAPH1; PIK3C3; MAPK8; |
| | F2R; MAPK3; SLC9A1; ITGA1; |
| | KRAS; RHOA; PRKCD; |
| | PRKAA1; MAPK9; CDK2; |
| | PIM1; PIK3C2A; ITGB7; |
| | PPP1CC; PXN; VIL2; RAF1; |
| | GSN; DYRK1A; ITGB1; |
| | MAP2K2; PAK4; PIP5K1A; |
| | PIK3R1; MAP2K1; PAK3; |
| | ITGB3; CDC42; APC; ITGA2; |
| | TTK; CSNK1A1; CRKL; |
| | BRAF; VAV3; SGK |
| Huntington's | PRKCE; IGF1; EP300; RCOR1; |
| Disease | PRKCZ; HDAC4; TGM2; |
| Signaling | MAPK1; CAPNS1; AKT2; EGFR; |
| | NCOR2; SP1; CAPN2; |
| | PIK3CA; HDAC5; CREB1; |
| | PRKCI; HSPA5; REST; |
| | GNAQ; PIK3CB; PIK3C3; |
| | MAPK8; IGF1R; PRKD1; |
| | GNB2L1; BCL2L1; CAPN1; |
| | MAPK3; CASP8; HDAC2; |
| | HDAC7A; PRKCD; HDAC11; |
| | MAPK9; HDAC9; PIK3C2A; |
| | HDAC3; TP53; CASP9; CREBBP; |
| | AKT1; PIK3R1; |
| | PDPK1; CASP1; APAF1; FRAP1; |
| | CASP2; JUN; BAX; |
| | ATF4; AKT3; PRKCA; CLTC; |
| | SGK; HDAC6; CASP3 |
| Apoptosis | PRKCE; ROCK1; BID; IRAK1; |
| Signaling | PRKAA2; EIF2AK2; BAK1; |
| | BIRC4; GRK6; MAPK1; CAPNS1; |
| | PLK1; AKT2; IKBKB; |
| | CAPN2; CDK8; FAS; NFKB2; |
| | BCL2; MAP3K14; MAPK8; |
| | BCL2L1; CAPN1; MAPK3; |
| | CASP8; KRAS; RELA; |
| | PRKCD; PRKAA1; MAPK9; |
| | CDK2; PIM1; TP53; TNF; |
| | RAF1; IKBKG; RELB; CASP9; |
| | DYRK1A; MAP2K2; |
| | CHUK; APAF1; MAP2K1; NFKB1; |
| | PAK3; LMNA; CASP2; |
| | BIRC2; TTK; CSNK1A1; BRAF; |
| | BAX; PRKCA; SGK; |
| | CASP3; BIRC3; PARP1 |
| B Cell | RAC1; PTEN; LYN; ELK1; |
| Receptor | MAPK1; RAC2; PTPN11; |
| Signaling | AKT2; IKBKB; PIK3CA; CREB1; |
| | SYK; NFKB2; CAMK2A; |
| | MAP3K14; PIK3CB; PIK3C3; |
| | MAPK8; BCL2L1; ABL1; |
| | MAPK3; ETS1; KRAS; MAPK13; |
| | RELA; PTPN6; MAPK9; |
| | EGR1; PIK3C2A; BTK; MAPK14; |
| | RAF1; IKBKG; RELB; |
| | MAP3K7; MAP2K2; AKT1; |
| | PIK3R1; CHUK; MAP2K1; |
| | NFKB1; CDC42; GSK3A; FRAP1; |
| | BCL6; BCL10; JUN; GSK3B; |
| | ATF4; AKT3; VAV3; RPS6KB1 |
| Leukocyte | ACTN4; CD44; PRKCE; ITGAM; |
| Extravasation | ROCK1; CXCR4; CYBA; |
| Signaling | RAC1; RAP1A; PRKCZ; |
| | ROCK2; RAC2; PTPN11; |
| | MMP14; PIK3CA; PRKCI; |
| | PTK2; PIK3CB; CXCL12; |
| | PIK3C3; MAPK8; PRKD1; |
| | ABL1; MAPK10; CYBB; |
| | MAPK13; RHOA; PRKCD; |
| | MAPK9; SRC; PIK3C2A; BTK; |
| | MAPK14; NOX1; PXN; VIL2; |
| | VASP; ITGB1; MAP2K2; |
| | CTNND1; PIK3R1; CTNNB1; |
| | CLDN1; CDC42; F11R; ITK; |
| | CRKL; VAV3; CTTN; PRKCA; |
| | MMP1; MMP9 |
| Integrin | ACTN4; ITGAM; ROCK1; ITGA5; |
| Signaling | RAC1; PTEN; RAP1A; |
| | TLN1; ARHGEF7; MAPK1; |
| | RAC2; CAPNS1; AKT2; |
| | CAPN2; PIK3CA; PTK2; PIK3CB; |
| | PIK3C3; MAPK8; |
| | CAV1; CAPN1; ABL1; MAPK3; |
| | ITGA1; KRAS; RHOA; |
| | SRC; PIK3C2A; ITGB7; |
| | PPP1CC; ILK; PXN; VASP; |
| | RAF1; FYN; ITGB1; MAP2K2; |
| | PAK4; AKT1; PIK3R1; |
| | TNK2; MAP2K1; PAK3; ITGB3; |
| | CDC42; RND3; ITGA2; |
| | CRKL; BRAF; GSK3B; AKT3 |
| Acute Phase | IRAK1; SOD2; MYD88; TRAF6; |
| Response | ELK1; MAPK1; PTPN11; |
| Signaling | AKT2; IKBKB; PIK3CA; FOS; |
| | NFKB2; MAP3K14; |
| | PIK3CB; MAPK8; RIPK1; |
| | MAPK3; IL6ST; KRAS; |
| | MAPK13; IL6R; RELA; SOCS1; |
| | MAPK9; FTL; NR3C1; |
| | TRAF2; SERPINE1; MAPK14; |
| | TNF; RAF1; PDK1; |
| | IKBKG; RELB; MAP3K7; MAP2K2; |
| | AKT1; JAK2; PIK3R1; |
| | CHUK; STAT3; MAP2K1; NFKB1; |
| | FRAP1; CEBPB; JUN; |
| | AKT3; IL1R1; IL6 |
| PTEN Signaling | ITGAM; ITGA5; RAC1; PTEN; |
| | PRKCZ; BCL2L11; |
| | MAPK1; RAC2; AKT2; EGFR; |
| | IKBKB; CBL; PIK3CA; |
| | CDKN1B; PTK2; NFKB2; |
| | BCL2; PIK3CB; BCL2L1; |
| | MAPK3; ITGA1; KRAS; ITGB7; |
| | ILK; PDGFRB; INSR; |
| | RAF1; IKBKG; CASP9; CDKN1A; |
| | ITGB1; MAP2K2; |
| | AKT1; PIK3R1; CHUK; PDGFRA; |
| | PDPK1; MAP2K1; |
| | NFKB1; ITGB3; CDC42; |
| | CCND1; GSK3A; ITGA2; |
| | GSK3B; AKT3; FOXO1; |
| | CASP3; RPS6KB1 |
| p53 Signaling | PTEN; EP300; BBC3; PCAF; |
| | FASN; BRCA1; GADD45A; |
| | BIRC5; AKT2; PIK3CA; CHEK1; |
| | TP53INP1; BCL2; |
| | PIK3CB; PIK3C3; MAPK8; THBS1; |
| | ATR; BCL2L1; E2F1; |
| | PMAIP1; CHEK2; TNFRSF10B; |
| | TP73; RB1; HDAC9; |
| | CDK2; PIK3C2A; MAPK14; |
| | TP53; LRDD; CDKN1A; |
| | HIPK2; AKT1; PIK3R1; |
| | RRM2B; APAF1; CTNNB1; |
| | SIRT1; CCND1; PRKDC; |
| | ATM; SFN; CDKN2A; JUN; |
| | SNAI2; GSK3B; BAX; AKT3 |
| Aryl | HSPB1; EP300; FASN; TGM2; |
| Hydrocarbon | RXRA; MAPK1; NQO1; |
| Receptor | NCOR2; SP1; ARNT; CDKN1B; |
| Signaling | FOS; CHEK1; |
| | SMARCA4; NFKB2; MAPK8; |
| | ALDH1A1; ATR; E2F1; |
| | MAPK3; NRIP1; CHEK2; RELA; |
| | TP73; GSTP1; RB1; |
| | SRC; CDK2; AHR; NFE2L2; |
| | NCOA3; TP53; TNF; |
| | CDKN1A; NCOA2; APAF1; NFKB1; |
| | CCND1; ATM; ESR1; |
| | CDKN2A; MYC; JUN; ESR2; |
| | BAX; IL6; CYP1B1; |
| | HSP90AA1 |
| Xenobiotic | PRKCE; EP300; PRKCZ; |
| Metabolism | RXRA; MAPK1; NQO1; |
| Signaling | NCOR2; PIK3CA; ARNT; |
| | PRKCI; NFKB2; CAMK2A; |
| | PIK3CB; PPP2R1A; PIK3C3; |
| | MAPK8; PRKD1; |
| | ALDH1A1; MAPK3; NRIP1; |
| | KRAS; MAPK13; PRKCD; |
| | GSTP1; MAPK9; NOS2A; |
| | ABCB1; AHR; PPP2CA; FTL; |
| | NFE2L2; PIK3C2A; PPARGC1A; |
| | MAPK14; TNF; RAF1; |
| | CREBBP; MAP2K2; PIK3R1; |
| | PPP2R5C; MAP2K1; |
| | NFKB1; KEAP1; PRKCA; |
| | EIF2AK3; IL6; CYP1B1; |
| | HSP90AA1 |
| SAPK/JNK | PRKCE; IRAK1; PRKAA2; |
| Signaling | EIF2AK2; RAC1; ELK1; |
| | GRK6; MAPK1; GADD45A; RAC2; |
| | PLK1; AKT2; PIK3CA; |
| | FADD; CDK8; PIK3CB; |
| | PIK3C3; MAPK8; RIPK1; |
| | GNB2L1; IRS1; MAPK3; |
| | MAPK10; DAXX; KRAS; |
| | PRKCD; PRKAA1; MAPK9; |
| | CDK2; PIM1; PIK3C2A; |
| | TRAF2; TP53; LCK; MAP3K7; |
| | DYRK1A; MAP2K2; |
| | PIK3R1; MAP2K1; PAK3; CDC42; |
| | JUN; TTK; CSNK1A1; |
| | CRKL; BRAF; SGK |
| PPAr/RXR | PRKAA2; EP300; INS; SMAD2; |
| Signaling | TRAF6; PPARA; FASN; |
| | RXRA; MAPK1; SMAD3; |
| | GNAS; IKBKB; NCOR2; |
| | ABCA1; GNAQ; NFKB2; |
| | MAP3K14; STAT5B; MAPK8; |
| | IRS1; MAPK3; KRAS; RELA; |
| | PRKAA1; PPARGC1A; |
| | NCOA3; MAPK14; INSR; RAF1; |
| | IKBKG; RELB; MAP3K7; |
| | CREBBP; MAP2K2; JAK2; |
| | CHUK; MAP2K1; NFKB1; |
| | TGFBR1; SMAD4; JUN; IL1R1; |
| | PRKCA; IL6; HSP90AA1; |
| | ADIPOQ |
| NF-KB Signaling | IRAK1; EIF2AK2; EP300; INS; |
| | MYD88; PRKCZ; TRAF6; |
| | TBK1; AKT2; EGFR; IKBKB; |
| | PIK3CA; BTRC; NFKB2; |
| | MAP3K14; PIK3CB; PIK3C3; |
| | MAPK8; RIPK1; HDAC2; |
| | KRAS; RELA; PIK3C2A; TRAF2; |
| | TLR4; PDGFRB; TNF; |
| | INSR; LCK; IKBKG; RELB; |
| | MAP3K7; CREBBP; AKT1; |
| | PIK3R1; CHUK; PDGFRA; |
| | NFKB1; TLR2; BCL10; |
| | GSK3B; AKT3; TNFAIP3; IL1R1 |
| Neuregulin | ERBB4; PRKCE; ITGAM; ITGA5; |
| Signaling | PTEN; PRKCZ; ELK1; |
| | MAPK1; PTPN11; AKT2; |
| | EGFR; ERBB2; PRKCI; |
| | CDKN1B; STAT5B; PRKD1; |
| | MAPK3; ITGA1; KRAS; |
| | PRKCD; STAT5A; SRC; ITGB7; |
| | RAF1; ITGB1; MAP2K2; |
| | ADAM17; AKT1; PIK3R1; |
| | PDPK1; MAP2K1; ITGB3; |
| | EREG; FRAP1; PSEN1; ITGA2; |
| | MYC; NRG1; CRKL; |
| | AKT3; PRKCA; HSP90AA1; |
| | RPS6KB1 |
| Wnt & Beta | CD44; EP300; LRP6; DVL3; |
| catenin | CSNK1E; GJA1; SMO; |
| Signaling | AKT2; PIN1; CDH1; BTRC; |
| | GNAQ; MARK2; PPP2R1A; |
| | WNT11; SRC; DKK1; PPP2CA; |
| | SOX6; SFRP2; ILK; |
| | LEF1; SOX9; TP53; MAP3K7; |
| | CREBBP; TCF7L2; AKT1; |
| | PPP2R5C; WNT5A; LRP5; |
| | CTNNB1; TGFBR1; CCND1; |
| | GSK3A; DVL1; APC; CDKN2A; |
| | MYC; CSNK1A1; GSK3B; |
| | AKT3; SOX2 |
| Insulin Receptor | PTEN; INS; EIF4E; PTPN1; |
| Signaling | PRKCZ; MAPK1; TSC1; |
| | PTPN11; AKT2; CBL; PIK3CA; |
| | PRKCI; PIK3CB; PIK3C3; |
| | MAPK8; IRS1; MAPK3; TSC2; |
| | KRAS; EIF4EBP1; |
| | SLC2A4; PIK3C2A; PPP1CC; |
| | INSR; RAF1; FYN; |
| | MAP2K2; JAK1; AKT1; JAK2; |
| | PIK3R1; PDPK1; MAP2K1; |
| | GSK3A; FRAP1; CRKL; GSK3B; |
| | AKT3; FOXO1; SGK; |
| | RPS6KB1 |
| IL-6 Signaling | HSPB1; TRAF6; MAPKAPK2; |
| | ELK1; MAPK1; PTPN11; |
| | IKBKB; FOS; NFKB2; MAP3K14; |
| | MAPK8; MAPK3; |
| | MAPK10; IL6ST; KRAS; MAPK13; |
| | IL6R; RELA; SOCS1; |
| | MAPK9; ABCB1; TRAF2; MAPK14; |
| | TNF; RAF1; IKBKG; |
| | RELB; MAP3K7; MAP2K2; IL8; |
| | JAK2; CHUK; STAT3; |
| | MAP2K1; NFKB1; CEBPB; JUN; |
| | IL1R1; SRF; IL6 |
| Hepatic | PRKCE; IRAK1; INS; MYD88; |
| Cholestasis | PRKCZ; TRAF6; PPARA; |
| | RXRA; IKBKB; PRKCI; NFKB2; |
| | MAP3K14; MAPK8; |
| | PRKD1; MAPK10; RELA; |
| | PRKCD; MAPK9; ABCB1; |
| | TRAF2; TLR4; TNF; INSR; |
| | IKBKG; RELB; MAP3K7; IL8; |
| | CHUK; NR1H2; TJP2; NFKB1; |
| | ESR1; SREBF1; FGFR4; |
| | JUN; IL1R1; PRKCA; IL6 |
| IGF-1 Signaling | IGF1; PRKCZ; ELK1; MAPK1; |
| | PTPN11; NEDD4; AKT2; |
| | PIK3CA; PRKCI; PTK2; FOS; |
| | PIK3CB; PIK3C3; MAPK8; |
| | IGF1R; IRS1; MAPK3; IGFBP7; |
| | KRAS; PIK3C2A; |
| | YWHAZ; PXN; RAF1; CASP9; |
| | MAP2K2; AKT1; PIK3R1; |
| | PDPK1; MAP2K1; IGFBP2; |
| | SFN; JUN; CYR61; AKT3; |
| | FOXO1; SRF; CTGF; RPS6KB1 |
| NRF2-mediated | PRKCE; EP300; SOD2; PRKCZ; |
| Oxidative | MAPK1; SQSTM1; |
| Stress | NQO1; PIK3CA; PRKCI; FOS; |
| Response | PIK3CB; PIK3C3; MAPK8; |
| | PRKD1; MAPK3; KRAS; PRKCD; |
| | GSTP1; MAPK9; FTL; |
| | NFE2L2; PIK3C2A; MAPK14; |
| | RAF1; MAP3K7; CREBBP; |
| | MAP2K2; AKT1; PIK3R1; MAP2K1; |
| | PPM; JUN; KEAP1; |
| | GSK3B; ATF4; PRKCA; |
| | EIF2AK3; HSP90AA1 |
| Hepatic | EDN1; IGF1; KDR; FLT1; |
| Fibrosis/Hepatic | SMAD2; FGFR1; MET; PGF; |
| Stellate Cell | SMAD3; EGFR; FAS; CSF1; |
| Activation | NFKB2; BCL2; MYH9; |
| | IGF1R; IL6R; RELA; TLR4; |
| | PDGFRB; TNF; RELB; IL8; |
| | PDGFRA; NFKB1; TGFBR1; |
| | SMAD4; VEGFA; BAX; |
| | IL1R1; CCL2; HGF; MIMP1; |
| | STAT1; IL6; CTGF; MMP9 |
| PPAR Signaling | EP300; INS; TRAF6; PPARA; |
| | RXRA; MAPK1; IKBKB; |
| | NCOR2; FOS; NFKB2; MAP3K14; |
| | STAT5B; MAPK3; |
| | NRIP1; KRAS; PPARG; RELA; |
| | STAT5A; TRAF2; |
| | PPARGC1A; PDGFRB; TNF; |
| | INSR; RAF1; IKBKG; |
| | RELB; MAP3K7; CREBBP; |
| | MAP2K2; CHUK; PDGFRA; |
| | MAP2K1; NFKB1; JUN; IL1R1; |
| | HSP90AA1 |
| Fc Epsilon RI | PRKCE; RAC1; PRKCZ; LYN; |
| Signaling | MAPK1; RAC2; PTPN11; |
| | AKT2; PIK3CA; SYK; PRKCI; |
| | PIK3CB; PIK3C3; MAPK8; |
| | PRKD1; MAPK3; MAPK10; KRAS; |
| | MAPK13; PRKCD; |
| | MAPK9; PIK3C2A; BTK; MAPK14; |
| | TNF; RAF1; FYN; |
| | MAP2K2; AKT1; PIK3R1; |
| | PDPK1; MAP2K1; AKT3; |
| | VAV3; PRKCA |
| G-Protein Coupled | PRKCE; RAP1A; RGS16; MAPK1; |
| Receptor Signaling | GNAS; AKT2; IKBKB; |
| | PIK3CA; CREB1; GNAQ; |
| | NFKB2; CAMK2A; PIK3CB; |
| | PIK3C3; MAPK3; KRAS; RELA; |
| | SRC; PIK3C2A; RAF1; |
| | IKBKG; RELB; FYN; MAP2K2; |
| | AKT1; PIK3R1; CHUK; |
| | PDPK1; STAT3; MAP2K1; |
| | NFKB1; BRAF; ATF4; AKT3; |
| | PRKCA |
| Inositol Phosphate | PRKCE; IRAK1; PRKAA2; |
| Metabolism | EIF2AK2; PTEN; GRK6; |
| | MAPK1; PLK1; AKT2; PIK3CA; |
| | CDK8; PIK3CB; PIK3C3; |
| | MAPK8; MAPK3; PRKCD; |
| | PRKAA1; MAPK9; CDK2; |
| | PIM1; PIK3C2A; DYRK1A; |
| | MAP2K2; PIP5K1A; PIK3R1; |
| | MAP2K1; PAK3; ATM; TTK; |
| | CSNK1A1; BRAF; SGK |
| PDGF Signaling | EIF2AK2; ELK1; ABL2; MAPK1; |
| | PIK3CA; FOS; PIK3CB; |
| | PIK3C3; MAPK8; CAV1; |
| | ABL1; MAPK3; KRAS; SRC; |
| | PIK3C2A; PDGFRB; RAF1; |
| | MAP2K2; JAK1; JAK2; |
| | PIK3R1; PDGFRA; STAT3; |
| | SPHK1; MAP2K1; MYC; |
| | JUN; CRKL; PRKCA; SRF; |
| | STAT1; SPHK2 |
| VEGF Signaling | ACTN4; ROCK1; KDR; FLT1; |
| | ROCK2; MAPK1; PGF; |
| | AKT2; PIK3CA; ARNT; PTK2; |
| | BCL2; PIK3CB; PIK3C3; |
| | BCL2L1; MAPK3; KRAS; HIF1A; |
| | NOS3; PIK3C2A; PXN; |
| | RAF1; MAP2K2; ELAVL1; AKT1; |
| | PIK3R1; MAP2K1; SFN; |
| | VEGFA; AKT3; FOXO1; PRKCA |
| Natural | PRKCE; RAC1; PRKCZ; MAPK1; |
| Killer Cell | RAC2; PTPN11; |
| Signaling | KIR2DL3; AKT2; PIK3CA; |
| | SYK; PRKCI; PIK3CB; |
| | PIK3C3; PRKD1; MAPK3; |
| | KRAS; PRKCD; PTPN6; |
| | PIK3C2A; LCK; RAF1; FYN; |
| | MAP2K2; PAK4; AKT1; |
| | PIK3R1; MAP2K1; PAK3; |
| | AKT3; VAV3; PRKCA |
| Cell Cycle: G1/S | HDAC4; SMAD3; SUV39H1; |
| Checkpoint | HDAC5; CDKN1B; BTRC; |
| Regulation | ATR; ABL1; E2F1; HDAC2; |
| | HDAC7A; RB1; HDAC11; |
| | HDAC9; CDK2; E2F2; HDAC3; |
| | TP53; CDKN1A; CCND1; |
| | E2F4; ATM; RBL2; SMAD4; |
| | CDKN2A; MYC; NRG1; |
| | GSK3B; RBL1; HDAC6 |
| T Cell Receptor | RAC1; ELK1; MAPK1; IKBKB; |
| Signaling | CBL; PIK3CA; FOS; |
| | NFKB2; PIK3CB; PIK3C3; |
| | MAPK8; MAPK3; KRAS; |
| | RELA; PIK3C2A; BTK; LCK; |
| | RAF1; IKBKG; RELB; FYN; |
| | MAP2K2; PIK3R1; CHUK; |
| | MAP2K1; NFKB1; ITK; BCL10; |
| | JUN; VAV3 |
| Death Receptor | CRADD; HSPB1; BID; BIRC4; |
| Signaling | TBK1; IKBKB; FADD; |
| | FAS; NFKB2; BCL2; MAP3K14; |
| | MAPK8; RIPK1; CASP8; |
| | DAXX; TNFRSF10B; RELA; |
| | TRAF2; TNF; IKBKG; RELB; |
| | CASP9; CHUK; APAF1; NFKB1; |
| | CASP2; BIRC2; CASP3; |
| | BIRC3 |
| FGF Signaling | RAC1; FGFR1; MET; MAPKAPK2; |
| | MAPK1; PTPN11; |
| | AKT2; PIK3CA; CREB1; |
| | PIK3CB; PIK3C3; MAPK8; |
| | MAPK3; MAPK13; PTPN6; |
| | PIK3C2A; MAPK14; RAF1; |
| | AKT1; PIK3R1; STAT3; MAP2K1; |
| | FGFR4; CRKL; ATF4; |
| | AKT3; PRKCA; HGF |
| GM-CSF Signaling | LYN; ELK1; MAPK1; PTPN11; |
| | AKT2; PIK3CA; CAMK2A; |
| | STAT5B; PIK3CB; PIK3C3; |
| | GNB2L1; BCL2L1; MAPK3; |
| | ETS1; KRAS; RUNX1; PIM1; |
| | PIK3C2A; RAF1; MAP2K2; |
| | AKT1; JAK2; PIK3R1; STAT3; |
| | MAP2K1; CCND1; AKT3; |
| | STAT1 |
| Amyotrophic | BID; IGF1; RAC1; BIRC4; PGF; |
| Lateral | CAPNS1; CAPN2; |
| Sclerosis | PIK3CA; BCL2; PIK3CB; |
| Signaling | PIK3C3; BCL2L1; CAPN1; |
| | PIK3C2A; TP53; CASP9; |
| | PIK3R1; RAB5A; CASP1; |
| | APAF1; VEGFA; BIRC2; BAX; |
| | AKT3; CASP3; BIRC3 |
| JAK/Stat | PTPN1; MAPK1; PTPN11; |
| Signaling | AKT2; PIK3CA; STAT5B; |
| | PIK3CB; PIK3C3; MAPK3; |
| | KRAS; SOCS1; STAT5A; |
| | PTPN6; PIK3C2A; RAF1; |
| | CDKN1A; MAP2K2; JAK1; |
| | AKT1; JAK2; PIK3R1; STAT3; |
| | MAP2K1; FRAP1; AKT3; |
| | STAT1 |
| Nicotinate and | PRKCE; IRAK1; PRKAA2; |
| Nicotinamide | EIF2AK2; GRK6; MAPK1; |
| Metabolism | PLK1; AKT2; CDK8; MAPK8; |
| | MAPK3; PRKCD; PRKAA1; |
| | PBEF1; MAPK9; CDK2; PIM1; |
| | DYRK1A; MAP2K2; |
| | MAP2K1; PAK3; NT5E; TTK; |
| | CSNK1A1; BRAF; SGK |
| Chemokine | CXCR4; ROCK2; MAPK1; |
| Signaling | PTK2; FOS; CFL1; GNAQ; |
| | CAMK2A; CXCL12; MAPK8; |
| | MAPK3; KRAS; MAPK13; |
| | RHOA; CCR3; SRC; PPP1CC; |
| | MAPK14; NOX1; RAF1; |
| | MAP2K2; MAP2K1; JUN; |
| | CCL2; PRKCA |
| IL-2 Signaling | ELK1; MAPK1; PTPN11; AKT2; |
| | PIK3CA; SYK; FOS; |
| | STAT5B; PIK3CB; PIK3C3; |
| | MAPK8; MAPK3; KRAS; |
| | SOCS1; STAT5A; PIK3C2A; |
| | LCK; RAF1; MAP2K2; |
| | JAK1; AKT1; PIK3R1; MAP2K1; |
| | JUN; AKT3 |
| Synaptic | PRKCE; IGF1; PRKCZ; PRDX6; |
| Long Term | LYN; MAPK1; GNAS; |
| Depression | PRKCI; GNAQ; PPP2R1A; |
| | IGF1R; PRKD1; MAPK3; |
| | KRAS; GRN; PRKCD; NOS3; |
| | NOS2A; PPP2CA; |
| | YWHAZ; RAF1; MAP2K2; |
| | PPP2R5C; MAP2K1; PRKCA |
| Estrogen | TAF4B; EP300; CARM1; PCAF; |
| Receptor | MAPK1; NCOR2; |
| Signaling | SMARCA4; MAPK3; NRIP1; |
| | KRAS; SRC; NR3C1; |
| | HDAC3; PPARGC1A; RBM9; |
| | NCOA3; RAF1; CREBBP; |
| | MAP2K2; NCOA2; MAP2K1; |
| | PRKDC; ESR1; ESR2 |
| Protein | TRAF6; SMURF1; BIRC4; |
| Ubiquitination | BRCA1; UCHL1; NEDD4; |
| Pathway | CBL; UBE2I; BTRC; HSPA5; |
| | USP7; USP10; FBW7; |
| | USP9X; STUB1; USP22; B2M; |
| | BIRC2; PARK2; USP8; |
| | USP1; VHL; HSP90AA1; BIRC3 |
| IL-10 Signaling | TRAF6; CCR1; ELK1; IKBKB; |
| | SP1; FOS; NFKB2; |
| | MAP3K14; MAPK8; MAPK13; |
| | RELA; MAPK14; TNF; |
| | IKBKG; RELB; MAP3K7; JAK1; |
| | CHUK; STAT3; NFKB1; |
| | JUN; IL1R1; IL6 |
| VDR/RXR | PRKCE; EP300; PRKCZ; |
| Activation | RXRA; GADD45A; HES1; |
| | NCOR2; SP1; PRKCI; CDKN1B; |
| | PRKD1; PRKCD; |
| | RUNX2; KLF4; YY1; NCOA3; |
| | CDKN1A; NCOA2; SPP1; |
| | LRP5; CEBPB; FOXO1; PRKCA |
| TGF-beta | EP300; SMAD2; SMURF1; |
| Signaling | MAPK1; SMAD3; SMAD1; |
| | FOS; MAPK8; MAPK3; |
| | KRAS; MAPK9; RUNX2; |
| | SERPINE1; RAF1; MAP3K7; |
| | CREBBP; MAP2K2; |
| | MAP2K1; TGFBR1; SMAD4; |
| | JUN; SMAD5 |
| Toll-like | IRAK1; EIF2AK2; MYD88; |
| Receptor | TRAF6; PPARA; ELK1; |
| Signaling | IKBKB; FOS; NFKB2; MAP3K14; |
| | MAPK8; MAPK13; |
| | RELA; TLR4; MAPK14; IKBKG; |
| | RELB; MAP3K7; CHUK; |
| | NFKB1; TLR2; JUN |
| p38 MAPK | HSPB1; IRAK1; TRAF6; |
| Signaling | MAPKAPK2; ELK1; FADD; FAS; |
| | CREB1; DDIT3; RPS6KA4; |
| | DAXX; MAPK13; TRAF2; |
| | MAPK14; TNF; MAP3K7; |
| | TGFBR1; MYC; ATF4; IL1R1; |
| | SRF; STAT1 |
| Neurotrophin/TRK | NTRK2; MAPK1; PTPN11; |
| Signaling | PIK3CA; CREB1; FOS; |
| | PIK3CB; PIK3C3; MAPK8; |
| | MAPK3; KRAS; PIK3C2A; |
| | RAF1; MAP2K2; AKT1; PIK3R1; |
| | PDPK1; MAP2K1; |
| | CDC42; JUN; ATF4 |
| FXR/RXR | INS; PPARA; FASN; RXRA; |
| Activation | AKT2; SDC1; MAPK8; |
| | APOB; MAPK10; PPARG; |
| | MTTP; MAPK9; PPARGC1A; |
| | TNF; CREBBP; AKT1; SREBF1; |
| | FGFR4; AKT3; FOXO1 |
| Synaptic | PRKCE; RAP1A; EP300; |
| Long Term | PRKCZ; MAPK1; CREB1; |
| Potentiation | PRKCI; GNAQ; CAMK2A; |
| | PRKD1; MAPK3; KRAS; |
| | PRKCD; PPP1CC; RAF1; |
| | CREBBP; MAP2K2; MAP2K1; |
| | ATF4; PRKCA |
| Calcium Signaling | RAP1A; EP300; HDAC4; |
| | MAPK1; HDAC5; CREB1; |
| | CAMK2A; MYH9; MAPK3; |
| | HDAC2; HDAC7A; HDAC11; |
| | HDAC9; HDAC3; CREBBP; |
| | CALR; CAMKK2; ATF4; |
| | HDAC6 |
| EGF Signaling | ELK1; MAPK1; EGFR; PIK3CA; |
| | FOS; PIK3CB; PIK3C3; |
| | MAPK8; MAPK3; PIK3C2A; |
| | RAF1; JAK1; PIK3R1; |
| | STAT3; MAP2K1; JUN; |
| | PRKCA; SRF; STAT1 |
| Hypoxia Signaling | EDN1; PTEN; EP300; NQO1; |
| in the | UBE2I; CREB1; ARNT; |
| Cardiovascular | HIF1A; SLC2A4; NOS3; |
| System | TP53; LDHA; AKT1; ATM; |
| | VEGFA; JUN; ATF4; |
| | VHL; HSP90AA1 |
| LPS/IL-1 | IRAK1; MYD88; TRAF6; |
| Mediated | PPARA; RXRA; ABCA1; |
| Inhibition | MAPK8; ALDH1A1; GSTP1; |
| of RXR Function | MAPK9; ABCB1; TRAF2; |
| | TLR4; TNF; MAP3K7; NR1H2; |
| | SREBF1; JUN; IL1R1 |
| LXR/RXR | FASN; RXRA; NCOR2; |
| Activation | ABCA1; NFKB2; IRF3; RELA; |
| | NOS2A; TLR4; TNF; RELB; |
| | LDLR; NR1H2; NFKB1; |
| | SREBF1; IL1R1; CCL2; IL6; MMP9 |
| Amyloid Processing | PRKCE; CSNK1E; MAPK1; |
| | CAPNS1; AKT2; CAPN2; |
| | CAPN1; MAPK3; MAPK13; |
| | MAPT; MAPK14; AKT1; |
| | PSEN1; CSNK1A1; GSK3B; |
| | AKT3; APP |
| IL-4 Signaling | AKT2; PIK3CA; PIK3CB; |
| | PIK3C3; IRS1; KRAS; SOCS1; |
| | PTPN6; NR3C1; PIK3C2A; JAK1; |
| | AKT1; JAK2; PIK3R1; |
| | FRAP1; AKT3; RPS6KB1 |
| Cell Cycle: | EP300; PCAF; BRCA1; |
| G2/M DNA | GADD45A; PLK1; BTRC; |
| Damage | CHEK1; ATR; CHEK2; YWHAZ; |
| Checkpoint | TP53; CDKN1A; |
| Regulation | PRKDC; ATM; SFN; CDKN2A |
| Nitric Oxide | KDR; FLT1; PGF; AKT2; |
| Signaling in | PIK3CA; PIK3CB; PIK3C3; |
| the Cardiovascular | CAV1; PRKCD; NOS3; |
| System | PIK3C2A; AKT1; PIK3R1; |
| | VEGFA; AKT3; HSP90AA1 |
| Purine Metabolism | NME2; SMARCA4; MYH9; |
| | RRM2; ADAR; EIF2AK4; |
| | PKM2; ENTPD1; RAD51; |
| | RRM2B; TJP2; RAD51C; |
| | NT5E; POLD1; NME1 |
| cAMP-mediated | RAP1A; MAPK1; GNAS; |
| Signaling | CREB1; CAMK2A; MAPK3; |
| | SRC; RAF1; MAP2K2; STAT3; |
| | MAP2K1; BRAF; ATF4 |
| Mitochondrial | SOD2; MAPK8; CASP8; |
| Dysfunction | MAPK10; MAPK9; CASP9; |
| | PARK7; PSEN1; PARK2; APP; |
| | CASP3 |
| Notch Signaling | HES1; JAG1; NUMB; NOTCH4; |
| | ADAM17; NOTCH2; |
| | PSEN1; NOTCH3; NOTCH1; DLL4 |
| Endoplasmic Reticulum | HSPA5; MAPK8; XBP1; TRAF2; |
| Stress Pathway | ATF6; CASP9; ATF4; |
| | EIF2AK3; CASP3 |
| Pyrimidine Metabolism | NME2; AICDA; RRM2; |
| | EIF2AK4; ENTPD1; RRM2B; |
| | NT5E; POLD1; NME1 |
| Parkinson's Signaling | UCHL1; MAPK8; MAPK13; |
| | MAPK14; CASP9; PARK7; |
| | PARK2; CASP3 |
| Cardiac & Beta | GNAS; GNAQ; PPP2R1A; GNB2L1; |
| Adrenergic | PPP2CA; PPP1CC; PPP2R5C |
| Signaling | |
| Glycolysis/ | HK2; GCK; GPI; ALDH1A1; |
| Gluconeogenesis | PKM2; LDHA; HK1 |
| Interferon Signaling | IRF1; SOCS1; JAK1; JAK2; |
| | IFITM1; STAT1; IFIT3 |
| Sonic Hedgehog | ARRB2; SMO; GLI2; DYRK1A; |
| Signaling | GLI1; GSK3B; DYRK1B |
| Glycerophospholipid | PLD1; GRN; GPAM; YWHAZ; |
| Metabolism | SPHK1; SPHK2 |
| Phospholipid | PRDX6; PLD1; GRN; YWHAZ; |
| Degradation | SPHK1; SPHK2 |
| Tryptophan | SIAH2; PRMT5; NEDD4; |
| Metabolism | ALDH1A1; CYP1B1; SIAH1 |
| Lysine Degradation | SUV39H1; EHMT2; NSD1; |
| | SETD7; PPP2R5C |
| Nucleotide Excision | ERCC5; ERCC4; XPA; XPC; ERCC1 |
| Repair | |
| Pathway | |
| Starch and Sucrose | UCHL1; HK2; GCK; GPI; HK1 |
| Metabolism | |
| Aminosugars | NQO1; HK2; GCK; HK1 |
| Metabolism | |
| Arachidonic Acid | PRDX6; GRN; YWHAZ; CYP1B1 |
| Metabolism | |
| Circadian Rhythm | CSNK1E; CREB1; ATF4; NR1D1 |
| Signaling | |
| Coagulation System | BDKRB1; F2R; SERPINE1; F3 |
| Dopamine Receptor | PPP2R1A; PPP2CA; PPP1CC; PPP2R5C |
| Signaling | |
| Glutathione | IDH2; GSTP1; ANPEP; IDH1 |
| Metabolism | |
| Glycerolipid | ALDH1A1; GPAM; SPHK1; SPHK2 |
| Metabolism | |
| Linoleic Acid | PRDX6; GRN; YWHAZ; CYP1B1 |
| Metabolism | |
| Methionine | DNMT1; DNMT3B; AHCY; DNMT3A |
| Metabolism | |
| Pyruvate Metabolism | GLO1; ALDH1A1; PKM2; LDHA |
| Arginine and Proline | ALDH1A1; NOS3; NOS2A |
| Metabolism | |
| Eicosanoid Signaling | PRDX6; GRN; YWHAZ |
| Fructose and Mannose | HK2; GCK; HK1 |
| Metabolism | |
| Galactose Metabolism | HK2; GCK; HK1 |
| Stilbene, | PRDX6; PRDX1; TYR |
| Coumarine and | |
| Lignin Biosynthesis | |
| Antigen Presentation | CALR; B2M |
| Pathway | |
| Biosynthesis of Steroids | NQO1; DHCR7 |
| Butanoate Metabolism | ALDH1A1; NLGN1 |
| Citrate Cycle | IDH2; IDH1 |
| Fatty Acid Metabolism | ALDH1A1; CYP1B1 |
| Glycerophospholipid | PRDX6; CHKA |
| Metabolism | |
| Histidine Metabolism | PRMT5; ALDH1A1 |
| Inositol Metabolism | ERO1L; APEX1 |
| Metabolism of | GSTP1; CYP1B1 |
| Xenobiotics | |
| by Cytochrome p450 | |
| Methane Metabolism | PRDX6; PRDX1 |
| Phenylalanine | PRDX6; PRDX1 |
| Metabolism | |
| Propanoate Metabolism | ALDH1A1; LDHA |
| Selenoamino Acid | PRMT5; AHCY |
| Metabolism | |
| Sphingolipid | SPHK1; SPHK2 |
| Metabolism | |
| Aminophosphonate | PRMT5 |
| Metabolism | |
| Androgen and Estrogen | PRMT5 |
| Metabolism | |
| Ascorbate and Aldarate | ALDH1A1 |
| Metabolism | |
| Bile Acid Biosynthesis | ALDH1A1 |
| Cysteine Metabolism | LDHA |
| Fatty Acid Biosynthesis | FASN |
| Glutamate Receptor | GNB2L1 |
| Signaling | |
| NRF2-mediated | PRDX1 |
| Oxidative | |
| Stress Response | |
| Pentose Phosphate | GPI |
| Pathway | |
| Pentose and | UCHL1 |
| Glucuronate | |
| Interconversions | |
| Retinol Metabolism | ALDH1A1 |
| Riboflavin Metabolism | TYR |
| Tyrosine Metabolism | PRMT5, TYR |
| Ubiquinone | PRMT5 |
| Biosynthesis | |
| Valine, Leucine and | ALDH1A1 |
| Isoleucine Degradation | |
| Glycine, Serine and | CHKA |
| Threonine Metabolism | |
| Lysine Degradation | ALDH1A1 |
| Pain/Taste | TRPM5; TRPA1 |
| Pain | TRPM7; TRPC5; TRPC6; |
| | TRPC1; Cnr1; cnr2; Grk2; |
| | Trpa1; Pomc; Cgrp; Crf; Pka; Era; |
| | Nr2b; TRPM5; Prkaca; |
| | Prkacb; Prkarla; Prkar2a |
| Mitochondrial | AIF; CytC; SMAC (Diablo); |
| Function | Aifm-1; Aifm-2 |
| Developmental | BMP-4; Chordin (Chrd); Noggin |
| Neurology | (Nog); WNT (Wnt2; |
| | Wnt2b; Wnt3a; Wnt4; Wnt5a; |
| | Wnt6; Wnt7b; Wnt8b; |
| | Wnt9a; Wnt9b; Wntl Oa; Wnt10b; |
| | Wnt16); beta-catenin; |
| | Dkk-1; Frizzled related proteins; |
| | Otx-2; Gbx2; FGF-8; |
| | Reelin; Dab1; unc-86 (Pou4f1 |
| | or Brn3a); Numb; Reln |

[1628] Embodiments of the invention also relate to methods and compositions related to knocking out genes, amplifying genes and repairing particular mutations associated with DNA repeat instability and neurological disorders (Robert D. Wells, Tetsuo Ashizawa, Genetic Instabilities and Neurological Diseases, Second Edition, Academic Press, Oct. 13, 2011-Medical). Specific aspects of tandem repeat sequences have been found to be responsible for more than twenty human diseases (New insights into repeat instability: role of RNA*DNA hybrids. McIvor E I, Polak U, Napierala M. RNA Biol. 2010 September-October; 7(5):551-8). The present effector protein systems may be harnessed to correct these defects of genomic instability.

[1629] Several further aspects of the invention relate to correcting defects associated with a wide range of genetic diseases which are further described on the website of the National Institutes of Health under the topic subsection Genetic Disorders (website at health.nih.gov/topic/GeneticDisorders). The genetic brain diseases may include but are not limited to Adrenoleukodystrophy, Agenesis of the Corpus Callosum, Aicardi Syndrome, Alpers' Disease, Alzheimer's Disease, Barth Syndrome, Batten Disease, CADASIL, Cerebellar Degeneration, Fabry's Disease, Gerstmann-Straussler-Scheinker Disease, Huntington's Disease and other Triplet Repeat Disorders, Leigh's Disease, Lesch-Nyhan Syndrome, Menkes Disease, Mitochondrial Myopathies and NINDS Colpocephaly. These diseases are further described on the website of the National Institutes of Health under the subsection Genetic Brain Disorders.

[1630] Throughout this disclosure there has been mention of CRISPR or CRISPR-Cas complexes or systems. CRISPR systems or complexes can target nucleic acid molecules, e.g., CRISPR-Cas complexes can target and cleave or nick or simply sit upon a target DNA molecule (depending if the Cas has mutations that render it a nickase or “dead”). Such systems or complexes are amenable for achieving tissue-specific and temporally controlled targeted deletion of candidate disease genes. Examples include but are not limited to genes involved in cholesterol and fatty acid metabolism, amyloid diseases, dominant negative diseases, latent viral infections, among other disorders. Accordingly, target sequences for such systems or complexes can be in candidate disease genes, e.g.:

TABLE 23

| Disease | GENE | SPACER | PAM | Mechanism | References |
|---|---|---|---|---|---|
| Hyperchole | HMG- | GCCAAATTG | CGG | Knockout | Fluvastatin: a review of its |
| sterolemia | CR | GACGACCCT | | | pharmacology and use in the |
| | | CG (SEQ ID | | | management of |
| | | NO: 219) | | | hypercholesterolaemia. (Plosker |
| | | | | | GL et al. Drugs 1996, 51(3):433- |
| | | | | | 459) |
| Hyperchole | | CGAGGAGAC | TGG | Knockout | Potential role of nonstatin |
| sterolemia | SQLE | CCCCGTTTC | | | cholesterol lowering agents |
| | | GG | | | (Trapani et al. IUBMB Life, |
| | | (SEQ ID NO: | | | Volume 63, Issue 11, pages 964- |
| | | 220) | | | 971, November 2011) |
| Hyperlipid | DGAT | CCCGCCGCC | AGG | Knockout | DGAT1 inhibitors as anti-obesity |
| emia | 1 | GCCGTGGCT | | | and anti-diabetic agents. (Birch |
| | | CG (SEQ ID | | | AM et al. Current Opinion in |
| | | NO: 221) | | | Drug Discovery & Development |
| Leukemia | BCR- | TGAGCTCTA | AGG | Knockout | Killing of leukemic cells with a |
| | ABL | CGAGATCCA | | | BCR/ABL fusion gene by RNA |
| | | CA (SEQ ID | | | interference (RNAi). (Fuchs et |
| | | NO: 222) | | | al. Oncogene 2002, 21(37):5716- |
| | | | | | 5724) |

[1631] Thus, the present invention, with regard to CRISPR or CRISPR-Cas complexes contemplates correction of hematopoietic disorders. For example, Severe Combined Immune Deficiency (SCID) results from a defect in lymphocytes T maturation, always associated with a functional defect in lymphocytes B (Cavazzana-Calvo et al., Annu. Rev. Med., 2005, 56, 585-602; Fischer et al., Immunol. Rev., 2005, 203, 98-109). In the case of Adenosine Deaminase (ADA) deficiency, one of the SCID forms, patients can be treated by injection of recombinant Adenosine Deaminase enzyme. Since the ADA gene has been shown to be mutated in SCID patients (Giblett et al., Lancet, 1972, 2, 1067-1069), several other genes involved in SCID have been identified (Cavazzana-Calvo et al., Annu. Rev. Med., 2005, 56, 585-602; Fischer et al., Immunol. Rev., 2005, 203, 98-109). There are four major causes for SCID: (i) the most frequent form of SCID, SCID-X1 (X-linked SCID or X-SCID), is caused by mutation in the IL2RG gene, resulting in the absence of mature T lymphocytes and NK cells. IL2RG encodes the gamma C protein (Noguchi, et al., Cell, 1993, 73, 147-157), a common component of at least five interleukin receptor complexes. These receptors activate several targets through the JAK3 kinase (Macchi et al., Nature, 1995, 377, 65-68), which inactivation results in the same syndrome as gamma C inactivation; (ii) mutation in the ADA gene results in a defect in purine metabolism that is lethal for lymphocyte precursors, which in turn results in the quasi absence of B, T and NK cells; (iii) V(D)J recombination is an essential step in the maturation of immunoglobulins and T lymphocytes receptors (TCRs). Mutations in Recombination Activating Gene 1 and 2 (RAG1 and RAG2) and Artemis, three genes involved in this process, result in the absence of mature T and B lymphocytes; and (iv) Mutations in other genes such as CD45, involved in T cell specific signaling have also been reported, although they represent a minority of cases (Cavazzana-Calvo et al., Annu. Rev. Med., 2005, 56, 585-602; Fischer et al., Immunol. Rev., 2005, 203, 98-109). In aspect of the invention, relating to CRISPR or CRISPR-Cas complexes contemplates system, the invention contemplates that it may be used to correct ocular defects that arise from several genetic mutations further described in Genetic Diseases of the Eye, Second Edition, edited by Elias I. Traboulsi, Oxford University Press, 2012. Non-limiting examples of ocular defects to be corrected include macular degeneration (MD), retinitis pigmentosa (RP). Non-limiting examples of genes and proteins associated with ocular defects include but are not limited to the following proteins: (ABCA4) ATP-binding cassette, sub-family A (ABC1), member 4 ACHM1 achromatopsia (rod monochromacy) 1 ApoE Apolipoprotein E (ApoE) C1QTNF5 (CTRP5) Clq and tumor necrosis factor related protein 5 (C1QTNF5) C2 Complement component 2 (C2) C3 Complement components (C3) CCL2 Chemokine (C-C motif) Ligand 2 (CCL2) CCR2 Chemokine (C-C motif) receptor 2 (CCR2) CD36 Cluster of Differentiation 36 CFB Complement factor B CFH Complement factor CFH H CFHR1 complement factor H-related 1 CFHR3 complement factor H-related 3 CNGB3 cyclic nucleotide gated channel beta 3 CP ceruloplasmin (CP) CRP C reactive protein (CRP) CST3 cystatin C or cystatin 3 (CST3) CTSD Cathepsin D (CTSD) CX3CR1 chemokine (C-X3-C motif) receptor 1 ELOVL4 Elongation of very long chain fatty acids 4 ERCC6 excision repair cross-complementing rodent repair deficiency, complementation group 6 FBLN5 Fibulin-5 FBLN5 Fibulin 5 FBLN6 Fibulin 6 FSCN2 fascin (FSCN2) HMCN1 Hemicentrin 1 HMCN1 hemicentin 1 HTRA1 HtrA serine peptidase 1 (HTRA1) HTRA1 HtrA serine peptidase 1 IL-6 Interleukin 6 IL-8 Interleukin 8 LOC387715 Hypothetical protein PLEKHA1 Pleckstrin homology domain-containing family A member 1 (PLEKHA1) PROM1 Prominin 1(PROM1 or CD133) PRPH2 Peripherin-2 RPGR retinitis pigmentosa GTPase regulator SERPING1 serpin peptidase inhibitor, clade G, member 1 (C1-inhibitor) TCOF1 Treacle TIMP3 Metalloproteinase inhibitor 3 (TIMP3) TLR3 Toll-like receptor 3 The present invention, with regard to CRISPR or CRISPR-Cas complexes contemplates also contemplates delivering to the heart. For the heart, a myocardium tropic adena-associated virus (AAVM) is preferred, in particular AAVM41 which showed preferential gene transfer in the heart (see, e.g., Lin-Yanga et al., PNAS, Mar. 10, 2009, vol. 106, no. 10). For example, US Patent Publication No. 20110023139, describes use of zinc finger nucleases to genetically modify cells, animals and proteins associated with cardiovascular disease. Cardiovascular diseases generally include high blood pressure, heart attacks, heart failure, and stroke and TIA. By way of example, the chromosomal sequence may comprise, but is not limited to, IL1B (interleukin 1, beta), XDH (xanthine dehydrogenase), TP53 (tumor protein p53), PTGIS (prostaglandin 12 (prostacyclin) synthase), MB (myoglobin), IL4 (interleukin 4), ANGPT1 (angiopoietin 1), ABCG8 (ATP-binding cassette, sub-family G (WHITE), member 8), CTSK (cathepsin K), PTGIR (prostaglandin 12 (prostacyclin) receptor (IP)), KCNJ11 (potassium inwardly-rectifying channel, subfamily J, member 11), INS (insulin), CRP (C-reactive protein, pentraxin-related), PDGFRB (platelet-derived growth factor receptor, beta polypeptide), CCNA2 (cyclin A2), PDGFB (platelet-derived growth factor beta polypeptide (simian sarcoma viral (v-sis) oncogene homolog)), KCNJ5 (potassium inwardly-rectifying channel, subfamily J, member 5), KCNN3 (potassium intermediate/small conductance calcium-activated channel, subfamily N, member 3), CAPN10 (calpain 10), PTGES (prostaglandin E synthase), ADRA2B (adrenergic, alpha-2B-, receptor), ABCG5 (ATP-binding cassette, sub-family G (WHITE), member 5), PRDX2 (peroxiredoxin 2), CAPN5 (calpain 5), PARP14 (poly (ADP-ribose) polymerase family, member 14), MEX3C (mex-3 homolog C (C. elegans)), ACE angiotensin I converting enzyme (peptidyl-dipeptidase A) 1), TNF (tumor necrosis factor (TNF superfamily, member 2)), IL6 (interleukin 6 (interferon, beta 2)), STN (statin), SERPINE1 (serpin peptidase inhibitor, clade E (nexin, plasminogen activator inhibitor type 1), member 1), ALB (albumin), ADIPOQ (adiponectin, C1Q and collagen domain containing), APOB (apolipoprotein B (including Ag(x) antigen)), APOE (apolipoprotein E), LEP (leptin), MTHFR (5,10-methylenetetrahydrofolate reductase (NADPH)), APOA1 (apolipoprotein A-I), EDN1 (endothelin 1), NPPB (natriuretic peptide precursor B), NOS3 (nitric oxide synthase 3 (endothelial cell)), PPARG (peroxisome proliferator-activated receptor gamma), PLAT (plasminogen activator, tissue), PTGS2 (prostaglandin-endoperoxide synthase 2 (prostaglandin G/H synthase and cyclooxygenase)), CETP (cholesteryl ester transfer protein, plasma), AGTR1 (angiotensin II receptor, type 1), HMGCR (3-hydroxy-3-methylglutaryl-Coenzyme A reductase), IGF1 (insulin-like growth factor 1 (somatomedin C)), SELE (selectin E), REN (renin), PPARA (peroxisome proliferator-activated receptor alpha), PON1 (paraoxonase 1), KNG1 (kininogen 1), CCL2 (chemokine (C-C motif) ligand 2), LPL (lipoprotein lipase), VWF (von Willebrand factor), F2 (coagulation factor II (thrombin)), ICAM1 (intercellular adhesion molecule 1), TGFB1 (transforming growth factor, beta 1), NPPA (natriuretic peptide precursor A), IL10 (interleukin 10), EPO (erythropoietin), SOD1 (superoxide dismutase 1, soluble), VCAM1 (vascular cell adhesion molecule 1), IFNG (interferon, gamma), LPA (lipoprotein, Lp(a)), MPO (myeloperoxidase), ESR1 (estrogen receptor 1), MAPK1 (mitogen-activated protein kinase 1), HP (haptoglobin), F3 (coagulation factor III (thromboplastin, tissue factor)), CST3 (cystatin C), COG2 (component of oligomeric golgi complex 2), MMP9 (matrix metallopeptidase 9 (gelatinase B, 92 kDa gelatinase, 92 kDa type IV collagenase)), SERPINC1 (serpin peptidase inhibitor, clade C (antithrombin), member 1), F8 (coagulation factor VIII, procoagulant component), HMOX1 (heme oxygenase (decycling) 1), APOC3 (apolipoprotein C-III), IL8 (interleukin 8), PROK1 (prokineticin 1), CBS (cystathionine-beta-synthase), NOS2 (nitric oxide synthase 2, inducible), TLR4 (toll-like receptor 4), SELP (selectin P (granule membrane protein 140 kDa, antigen CD62)), ABCA1 (ATP-binding cassette, sub-family A (ABC1), member 1), AGT (angiotensinogen (serpin peptidase inhibitor, clade A, member 8)), LDLR (low density lipoprotein receptor), GPT (glutamic-pyruvate transaminase (alanine aminotransferase)), VEGFA (vascular endothelial growth factor A), NR3C2 (nuclear receptor subfamily 3, group C, member 2), IL18 (interleukin 18 (interferon-gamma-inducing factor)), NOS1 (nitric oxide synthase 1 (neuronal)), NR3C1 (nuclear receptor subfamily 3, group C, member 1 (glucocorticoid receptor)), FGB (fibrinogen beta chain), HGF (hepatocyte growth factor (hepapoietin A; scatter factor)), IL1A (interleukin 1, alpha), RETN (resistin), AKT1 (v-akt murine thymoma viral oncogene homolog 1), LIPC (lipase, hepatic), HSPD1 (heat shock 60 kDa protein 1 (chaperonin)), MAPK14 (mitogen-activated protein kinase 14), SPP1 (secreted phosphoprotein 1), ITGB3 (integrin, beta 3 (platelet glycoprotein 111a, antigen CD61)), CAT (catalase), UTS2 (urotensin 2), THBD (thrombomodulin), F10 (coagulation factor X), CP (ceruloplasmin (ferroxidase)), TNFRSF 11B (tumor necrosis factor receptor superfamily, member 11b), EDNRA (endothelin receptor type A), EGFR (epidermal growth factor receptor (erythroblastic leukemia viral (v-erb-b) oncogene homolog, avian)), MMP2 (matrix metallopeptidase 2 (gelatinase A, 72 kDa gelatinase, 72 kDa type IV collagenase)), PLG (plasminogen), NPY (neuropeptide Y), RHOD (ras homolog gene family, member D), MAPK8 (mitogen-activated protein kinase 8), MYC (v-myc myelocytomatosis viral oncogene homolog (avian)), FN1 (fibronectin 1), CMA1 (chymase 1, mast cell), PLAU (plasminogen activator, urokinase), GNB3 (guanine nucleotide binding protein (G protein), beta polypeptide 3), ADRB2 (adrenergic, beta-2-, receptor, surface), APOA5 (apolipoprotein A-V), SOD2 (superoxide dismutase 2, mitochondrial), F5 (coagulation factor V (proaccelerin, labile factor)), VDR (vitamin D (1,25-dihydroxyvitamin D3) receptor), ALOX5 (arachidonate 5-lipoxygenase), HLA-DRB1 (major histocompatibility complex, class II, DR beta 1), PARP1 (poly (ADP-ribose) polymerase 1), CD40LG (CD40 ligand), PON2 (paraoxonase 2), AGER (advanced glycosylation end product-specific receptor), IRS1 (insulin receptor substrate 1), PTGS1 (prostaglandin-endoperoxide synthase 1 (prostaglandin G/H synthase and cyclooxygenase)), ECE1 (endothelin converting enzyme 1), F7 (coagulation factor VII (serum prothrombin conversion accelerator)), URN (interleukin 1 receptor antagonist), EPHX2 (epoxide hydrolase 2, cytoplasmic), IGFBP1 (insulin-like growth factor binding protein 1), MAPK10 (mitogen-activated protein kinase 10), FAS (Fas (TNF receptor superfamily, member 6)), ABCB1 (ATP-binding cassette, sub-family B (MDR/TAP), member 1), JUN (jun oncogene), IGFBP3 (insulin-like growth factor binding protein 3), CD14 (CD14 molecule), PDE5A (phosphodiesterase 5A, cGMP-specific), AGTR2 (angiotensin II receptor, type 2), CD40 (CD40 molecule, TNF receptor superfamily member 5), LCAT (lecithin-cholesterol acyltransferase), CCR5 (chemokine (C-C motif) receptor 5), MMP1 (matrix metallopeptidase 1 (interstitial collagenase)), TIMP1 (TIMP metallopeptidase inhibitor 1), ADM (adrenomedullin), DYT10 (dystonia 10), STAT3 (signal transducer and activator of transcription 3 (acute-phase response factor)), MMP3 (matrix metallopeptidase 3 (stromelysin 1, progelatinase)), ELN (elastin), USF1 (upstream transcription factor 1), CFH (complement factor H), HSPA4 (heat shock 70 kDa protein 4), MMP12 (matrix metallopeptidase 12 (macrophage elastase)), MME (membrane metallo-endopeptidase), F2R (coagulation factor II (thrombin) receptor), SELL (selectin L), CTSB (cathepsin B), ANXA5 (annexin AS), ADRB1 (adrenergic, beta-1-, receptor), CYBA (cytochrome b-245, alpha polypeptide), FGA (fibrinogen alpha chain), GGT1 (gamma-glutamyltransferase 1), LIPG (lipase, endothelial), HIF1A (hypoxia inducible factor 1, alpha subunit (basic helix-loop-helix transcription factor)), CXCR4 (chemokine (C-X-C motif) receptor 4), PROC (protein C (inactivator of coagulation factors Va and VIIIa)), SCARB 1 (scavenger receptor class B, member 1), CD79A (CD79a molecule, immunoglobulin-associated alpha), PLTP (phospholipid transfer protein), ADDI (adducin 1 (alpha)), FGG (fibrinogen gamma chain), SAA1 (serum amyloid A1), KCNH2 (potassium voltage-gated channel, subfamily H (eag-related), member 2), DPP4 (dipeptidyl-peptidase 4), G6PD (glucose-6-phosphate dehydrogenase), NPR1 (natriuretic peptide receptor A/guanylate cyclase A (atrionatriuretic peptide receptor A)), VTN (vitronectin), KIAA0101 (KIAA0101), FOS (FBJ murine osteosarcoma viral oncogene homolog), TLR2 (toll-like receptor 2), PPIG (peptidylprolyl isomerase G (cyclophilin G)), IL1R1 (interleukin 1 receptor, type I), AR (androgen receptor), CYP1A1 (cytochrome P450, family 1, subfamily A, polypeptide 1), SERPINA1 (serpin peptidase inhibitor, clade A (alpha-1 antiproteinase, antitrypsin), member 1), MTR (5-methyltetrahydrofolate-homocysteine methyltransferase), RBP4 (retinol binding protein 4, plasma), APOA4 (apolipoprotein A-IV), CDKN2A (cyclin-dependent kinase inhibitor 2A (melanoma, p16, inhibits CDK4)), FGF2 (fibroblast growth factor 2 (basic)), EDNRB (endothelin receptor type B), ITGA2 (integrin, alpha 2 (CD49B, alpha 2 subunit of VLA-2 receptor)), CABINi (calcineurin binding protein 1), SHBG (sex hormone-binding globulin), HMGB1 (high-mobility group box 1), HSP90B2P (heat shock protein 90 kDa beta (Grp94), member 2 (pseudogene)), CYP3A4 (cytochrome P450, family 3, subfamily A, polypeptide 4), GJA1 (gap junction protein, alpha 1, 43 kDa), CAV1 (caveolin 1, caveolae protein, 22 kDa), ESR2 (estrogen receptor 2 (ER beta)), LTA (lymphotoxin alpha (TNF superfamily, member 1)), GDF15 (growth differentiation factor 15), BDNF (brain-derived neurotrophic factor), CYP2D6 (cytochrome P450, family 2, subfamily D, polypeptide 6), NGF (nerve growth factor (beta polypeptide)), SP1 (Sp1 transcription factor), TGIF1 (TGFB-induced factor homeobox 1), SRC (v-src sarcoma (Schmidt-Ruppin A-2) viral oncogene homolog (avian)), EGF (epidermal growth factor (beta-urogastrone)), PIK3CG (phosphoinositide-3-kinase, catalytic, gamma polypeptide), HLA-A (major histocompatibility complex, class I, A), KCNQ1 (potassium voltage-gated channel, KQT-like subfamily, member 1), CNR1 (cannabinoid receptor 1 (brain)), FBN1 (fibrillin 1), CHKA (choline kinase alpha), BEST1 (bestrophin 1), APP (amyloid beta (A4) precursor protein), CTNNB1 (catenin (cadherin-associated protein), beta 1, 88 kDa), IL2 (interleukin 2), CD36 (CD36 molecule (thrombospondin receptor)), PRKAB1 (protein kinase, AMP-activated, beta 1 non-catalytic subunit), TPO (thyroid peroxidase), ALDH7A1 (aldehyde dehydrogenase 7 family, member A1), CX3CR1 (chemokine (C-X3-C motif) receptor 1), TH (tyrosine hydroxylase), F9 (coagulation factor IX), GH1 (growth hormone 1), TF (transferrin), HFE (hemochromatosis), IL17A (interleukin 17A), PTEN (phosphatase and tensin homolog), GSTM1 (glutathione S-transferase mu 1), DMD (dystrophin), GATA4 (GATA binding protein 4), F13A1 (coagulation factor XIII, A1 polypeptide), TTR (transthyretin), FABP4 (fatty acid binding protein 4, adipocyte), PON3 (paraoxonase 3), APOC1 (apolipoprotein C-I), INSR (insulin receptor), TNFRSF1B (tumor necrosis factor receptor superfamily, member 1B), HTR2A (5-hydroxytryptamine (serotonin) receptor 2A), CSF3 (colony stimulating factor 3 (granulocyte)), CYP2C9 (cytochrome P450, family 2, subfamily C, polypeptide 9), TXN (thioredoxin), CYP11B2 (cytochrome P450, family 11, subfamily B, polypeptide 2), PTH (parathyroid hormone), CSF2 (colony stimulating factor 2 (granulocyte-macrophage)), KDR (kinase insert domain receptor (a type III receptor tyrosine kinase)), PLA2G2A (phospholipase A2, group IIA (platelets, synovial fluid)), B2M (beta-2-microglobulin), THBS1 (thrombospondin 1), GCG (glucagon), RHOA (ras homolog gene family, member A), ALDH2 (aldehyde dehydrogenase 2 family (mitochondrial)), TCF7L2 (transcription factor 7-like 2 (T-cell specific, HMG-box)), BDKRB2 (bradykinin receptor B2), NFE2L2 (nuclear factor (erythroid-derived 2)-like 2), NOTCH1 (Notch homolog 1, translocation-associated (Drosophila)), UGT1A1 (UDP glucuronosyltransferase 1 family, polypeptide A1), IFNA1 (interferon, alpha 1), PPARD (peroxisome proliferator-activated receptor delta), SIRT1 (sirtuin (silent mating type information regulation 2 homolog) 1 (S. cerevisiae)), GNRH1 (gonadotropin-releasing hormone 1 (luteinizing-releasing hormone)), PAPPA (pregnancy-associated plasma protein A, pappalysin 1), ARR3 (arrestin 3, retinal (X-arrestin)), NPPC (natriuretic peptide precursor C), AHSP (alpha hemoglobin stabilizing protein), PTK2 (PTK2 protein tyrosine kinase 2), IL13 (interleukin 13), MTOR (mechanistic target of rapamycin (serine/threonine kinase)), ITGB2 (integrin, beta 2 (complement component 3 receptor 3 and 4 subunit)), GSTT1 (glutathione S-transferase theta 1), IL6ST (interleukin 6 signal transducer (gp130, oncostatin M receptor)), CPB2 (carboxypeptidase B2 (plasma)), CYP1A2 (cytochrome P450, family 1, subfamily A, polypeptide 2), HNF4A (hepatocyte nuclear factor 4, alpha), SLC6A4 (solute carrier family 6 (neurotransmitter transporter, serotonin), member 4), PLA2G6 (phospholipase A2, group VI (cytosolic, calcium-independent)), TNFSF11 (tumor necrosis factor (ligand) superfamily, member 11), SLC8A1 (solute carrier family 8 (sodium/calcium exchanger), member 1), F2RL1 (coagulation factor II (thrombin) receptor-like 1), AKR1A1 (aldo-keto reductase family 1, member A1 (aldehyde reductase)), ALDH9A1 (aldehyde dehydrogenase 9 family, member A1), BGLAP (bone gamma-carboxyglutamate (gla) protein), MTTP (microsomal triglyceride transfer protein), MTRR (5-methyltetrahydrofolate-homocysteine methyltransferase reductase), SULT1A3 (sulfotransferase family, cytosolic, 1A, phenol-preferring, member 3), RAGE (renal tumor antigen), C4B (complement component 4B (Chido blood group), P2RY12 (purinergic receptor P2Y, G-protein coupled, 12), RNLS (renalase, FAD-dependent amine oxidase), CREB1 (cAMP responsive element binding protein 1), POMC (proopiomelanocortin), RAC1 (ras-related C3 botulinum toxin substrate 1 (rho family, small GTP binding protein Rac1)), LMNA (lamin NC), CD59 (CD59 molecule, complement regulatory protein), SCN5A (sodium channel, voltage-gated, type V, alpha subunit), CYP1B1 (cytochrome P450, family 1, subfamily B, polypeptide 1), MIF (macrophage migration inhibitory factor (glycosylation-inhibiting factor)), MMP13 (matrix metallopeptidase 13 (collagenase 3)), TIMP2 (TIMP metallopeptidase inhibitor 2), CYP19A1 (cytochrome P450, family 19, subfamily A, polypeptide 1), CYP21A2 (cytochrome P450, family 21, subfamily A, polypeptide 2), PTPN22 (protein tyrosine phosphatase, non-receptor type 22 (lymphoid)), MYH14 (myosin, heavy chain 14, non-muscle), MBL2 (mannose-binding lectin (protein C) 2, soluble (opsonic defect)), SELPLG (selectin P ligand), AOC3 (amine oxidase, copper containing 3 (vascular adhesion protein 1)), CTSL1 (cathepsin L1), PCNA (proliferating cell nuclear antigen), IGF2 (insulin-like growth factor 2 (somatomedin A)), ITGB1 (integrin, beta 1 (fibronectin receptor, beta polypeptide, antigen CD29 includes MDF2, MSK12)), CAST (calpastatin), CXCL12 (chemokine (C-X-C motif) ligand 12 (stromal cell-derived factor 1)), IGHE (immunoglobulin heavy constant epsilon), KCNE1 (potassium voltage-gated channel, Isk-related family, member 1), TFRC (transferrin receptor (p90, CD71)), COL1A1 (collagen, type I, alpha 1), COL1A2 (collagen, type I, alpha 2), IL2RB (interleukin 2 receptor, beta), PLA2G10 (phospholipase A2, group X), ANGPT2 (angiopoietin 2), PROCR (protein C receptor, endothelial (EPCR)), NOX4 (NADPH oxidase 4), HAMP (hepcidin antimicrobial peptide), PTPN11 (protein tyrosine phosphatase, non-receptor type 11), SLC2A1 (solute carrier family 2 (facilitated glucose transporter), member 1), IL2RA (interleukin 2 receptor, alpha), CCL5 (chemokine (C-C motif) ligand 5), IRF1 (interferon regulatory factor 1), CFLAR (CASP8 and FADD-like apoptosis regulator), CALCA (calcitonin-related polypeptide alpha), EIF4E (eukaryotic translation initiation factor 4E), GSTP1 (glutathione S-transferase pi 1), JAK2 (Janus kinase 2), CYP3A5 (cytochrome P450, family 3, subfamily A, polypeptide 5), HSPG2 (heparan sulfate proteoglycan 2), CCL3 (chemokine (C-C motif) ligand 3), MYD88 (myeloid differentiation primary response gene (88)), VIP (vasoactive intestinal peptide), SOAT1 (sterol O-acyltransferase 1), ADRBK1 (adrenergic, beta, receptor kinase 1), NR4A2 (nuclear receptor subfamily 4, group A, member 2), MMP8 (matrix metallopeptidase 8 (neutrophil collagenase)), NPR2 (natriuretic peptide receptor B/guanylate cyclase B (atrionatriuretic peptide receptor B)), GCH1 (GTP cyclohydrolase 1), EPRS (glutamyl-prolyl-tRNA synthetase), PPARGC1A (peroxisome proliferator-activated receptor gamma, coactivator 1 alpha), F12 (coagulation factor XII (Hageman factor)), PECAM1 (platelet/endothelial cell adhesion molecule), CCL4 (chemokine (C-C motif) ligand 4), SERPINA3 (serpin peptidase inhibitor, clade A (alpha-1 antiproteinase, antitrypsin), member 3), CASR (calcium-sensing receptor), GJA5 (gap junction protein, alpha 5, 40 kDa), FABP2 (fatty acid binding protein 2, intestinal), TTF2 (transcription termination factor, RNA polymerase II), PROS1 (protein S (alpha)), CTF1 (cardiotrophin 1), SGCB (sarcoglycan, beta (43 kDa dystrophin-associated glycoprotein)), YME1L1 (YME1-like 1 (S. cerevisiae)), CAMP (cathelicidin antimicrobial peptide), ZC3H12A (zinc finger CCCH-type containing 12A), AKR1B1 (aldo-keto reductase family 1, member B1 (aldose reductase)), DES (desmin), MMP7 (matrix metallopeptidase 7 (matrilysin, uterine)), AHR (aryl hydrocarbon receptor), CSF1 (colony stimulating factor 1 (macrophage)), HDAC9 (histone deacetylase 9), CTGF (connective tissue growth factor), KCNMA1 (potassium large conductance calcium-activated channel, subfamily M, alpha member 1), UGT1A (UDP glucuronosyltransferase 1 family, polypeptide A complex locus), PRKCA (protein kinase C, alpha), COMT (catechol-.beta.-methyltransferase), S100B (S100 calcium binding protein B), EGR1 (early growth response 1), PRL (prolactin), IL15 (interleukin 15), DRD4 (dopamine receptor D4), CAMK2G (calcium/calmodulin-dependent protein kinase II gamma), SLC22A2 (solute carrier family 22 (organic cation transporter), member 2), CCL11 (chemokine (C-C motif) ligand 11), PGF (B321 placental growth factor), THPO (thrombopoietin), GP6 (glycoprotein VI (platelet)), TACR1 (tachykinin receptor 1), NTS (neurotensin), HNF1A (HNF1 homeobox A), SST (somatostatin), KCND1 (potassium voltage-gated channel, Shal-related subfamily, member 1), LOC646627 (phospholipase inhibitor), TBXAS1 (thromboxane A synthase 1 (platelet)), CYP2J2 (cytochrome P450, family 2, subfamily J, polypeptide 2), TBXA2R (thromboxane A2 receptor), ADH1C (alcohol dehydrogenase 1C (class I), gamma polypeptide), ALOX12 (arachidonate 12-lipoxygenase), AHSG (alpha-2-HS-glycoprotein), BHMT (betaine-homocysteine methyltransferase), GJA4 (gap junction protein, alpha 4, 37 kDa), SLC25A4 (solute carrier family 25 (mitochondrial carrier; adenine nucleotide translocator), member 4), ACLY (ATP citrate lyase), ALOX5AP (arachidonate 5-lipoxygenase-activating protein), NUMA1 (nuclear mitotic apparatus protein 1), CYP27B1 (cytochrome P450, family 27, subfamily B, polypeptide 1), CYSLTR2 (cysteinyl leukotriene receptor 2), SOD3 (superoxide dismutase 3, extracellular), LTC4S (leukotriene C4 synthase), UCN (urocortin), GHRL (ghrelin/obestatin prepropeptide), APOC2 (apolipoprotein C-II), CLEC4A (C-type lectin domain family 4, member A), KBTBD10 (kelch repeat and BTB (POZ) domain containing 10), TNC (tenascin C), TYMS (thymidylate synthetase), SHCI (SHC (Src homology 2 domain containing) transforming protein 1), LRP1 (low density lipoprotein receptor-related protein 1), SOCS3 (suppressor of cytokine signaling 3), ADH1B (alcohol dehydrogenase 1B (class I), beta polypeptide), KLK3 (kallikrein-related peptidase 3), HSD11B1 (hydroxysteroid (11-beta) dehydrogenase 1), VKORC1 (vitamin K epoxide reductase complex, subunit 1), SERPINB2 (serpin peptidase inhibitor, clade B (ovalbumin), member 2), TNS1 (tensin 1), RNF19A (ring finger protein 19A), EPOR (erythropoietin receptor), ITGAM (integrin, alpha M (complement component 3 receptor 3 subunit)), PITX2 (paired-like homeodomain 2), MAPK7 (mitogen-activated protein kinase 7), FCGR3A (Fc fragment of IgG, low affinity 111a, receptor (CD16a)), LEPR (leptin receptor), ENG (endoglin), GPX1 (glutathione peroxidase 1), GOT2 (glutamic-oxaloacetic transaminase 2, mitochondrial (aspartate aminotransferase 2)), HRH1 (histamine receptor H1), NR112 (nuclear receptor subfamily 1, group I, member 2), CRH (corticotropin releasing hormone), HTR1A (5-hydroxytryptamine (serotonin) receptor 1A), VDAC1 (voltage-dependent anion channel 1), HPSE (heparanase), SFTPD (surfactant protein D), TAP2 (transporter 2, ATP-binding cassette, sub-family B (MDR/TAP)), RNF123 (ring finger protein 123), PTK2B (PTK2B protein tyrosine kinase 2 beta), NTRK2 (neurotrophic tyrosine kinase, receptor, type 2), IL6R (interleukin 6 receptor), ACHE (acetylcholinesterase (Yt blood group)), GLP1R (glucagon-like peptide 1 receptor), GHR (growth hormone receptor), GSR (glutathione reductase), NQO1 (NAD(P)H dehydrogenase, quinone 1), NR5A1 (nuclear receptor subfamily 5, group A, member 1), GJB2 (gap junction protein, beta 2, 26 kDa), SLC9A1 (solute carrier family 9 (sodium/hydrogen exchanger), member 1), MAOA (monoamine oxidase A), PCSK9 (proprotein convertase subtilisin/kexin type 9), FCGR2A (Fc fragment of IgG, low affinity IIa, receptor (CD32)), SERPINF 1 (serpin peptidase inhibitor, clade F (alpha-2 antiplasmin, pigment epithelium derived factor), member 1), EDN3 (endothelin 3), DHFR (dihydrofolate reductase), GAS6 (growth arrest-specific 6), SMPD1 (sphingomyelin phosphodiesterase 1, acid lysosomal), UCP2 (uncoupling protein 2 (mitochondrial, proton carrier)), TFAP2A (transcription factor AP-2 alpha (activating enhancer binding protein 2 alpha)), C4BPA (complement component 4 binding protein, alpha), SERPINF2 (serpin peptidase inhibitor, clade F (alpha-2 antiplasmin, pigment epithelium derived factor), member 2), TYMP (thymidine phosphorylase), ALPP (alkaline phosphatase, placental (Regan isozyme)), CXCR2 (chemokine (C-X-C motif) receptor 2), SLC39A3 (solute carrier family 39 (zinc transporter), member 3), ABCG2 (ATP-binding cassette, sub-family G (WHITE), member 2), ADA (adenosine deaminase), JAK3 (Janus kinase 3), HSPA1A (heat shock 70 kDa protein 1A), FASN (fatty acid synthase), FGF1 (fibroblast growth factor 1 (acidic)), F11 (coagulation factor XI), ATP7A (ATPase, Cu++ transporting, alpha polypeptide), CR1 (complement component (3b/4b) receptor 1 (Knops blood group)), GFAP (glial fibrillary acidic protein), ROCK1 (Rho-associated, coiled-coil containing protein kinase 1), MECP2 (methyl CpG binding protein 2 (Rett syndrome)), MYLK (myosin light chain kinase), BCHE (butyrylcholinesterase), LIPE (lipase, hormone-sensitive), PRDX5 (peroxiredoxin 5), ADORA1 (adenosine A1 receptor), WRN (Werner syndrome, RecQ helicase-like), CXCR3 (chemokine (C-X-C motif) receptor 3), CD81 (CD81 molecule), SMAD7 (SMAD family member 7), LAMC2 (laminin, gamma 2), MAP3K5 (mitogen-activated protein kinase kinase kinase 5), CHGA (chromogranin A (parathyroid secretory protein 1)), IAPP (islet amyloid polypeptide), RHO (rhodopsin), ENPP1 (ectonucleotide pyrophosphatase/phosphodiesterase 1), PTHLH (parathyroid hormone-like hormone), NRG1 (neuregulin 1), VEGFC (vascular endothelial growth factor C), ENPEP (glutamyl aminopeptidase (aminopeptidase A)), CEBPB (CCAAT/enhancer binding protein (C/EBP), beta), NAGLU (N-acetylglucosaminidase, alpha-), F2RL3 (coagulation factor II (thrombin) receptor-like 3), CX3CL1 (chemokine (C-X3-C motif) ligand 1), BDKRB1 (bradykinin receptor BI), ADAMTS13 (ADAM metallopeptidase with thrombospondin type 1 motif, 13), ELANE (elastase, neutrophil expressed), ENPP2 (ectonucleotide pyrophosphatase/phosphodiesterase 2), CISH (cytokine inducible SH2-containing protein), GAST (gastrin), MYOC (myocilin, trabecular meshwork inducible glucocorticoid response), ATP1A2 (ATPase, Na+/K+ transporting, alpha 2 polypeptide), NF1 (neurofibromin 1), GJB1 (gap junction protein, beta 1, 32 kDa), MEF2A (myocyte enhancer factor 2A), VCL (vinculin), BMPR2 (bone morphogenetic protein receptor, type II (serine/threonine kinase)), TUBB (tubulin, beta), CDC42 (cell division cycle 42 (GTP binding protein, 25 kDa)), KRT18 (keratin 18), HSF1 (heat shock transcription factor 1), MYB (v-myb myeloblastosis viral oncogene homolog (avian)), PRKAA2 (protein kinase, AMP-activated, alpha 2 catalytic subunit), ROCK2 (Rho-associated, coiled-coil containing protein kinase 2), TFPI (tissue factor pathway inhibitor (lipoprotein-associated coagulation inhibitor)), PRKG1 (protein kinase, cGMP-dependent, type I), BMP2 (bone morphogenetic protein 2), CTNND1 (catenin (cadherin-associated protein), delta 1), CTH (cystathionase (cystathionine gamma-lyase)), CTSS (cathepsin S), VAV2 (vav 2 guanine nucleotide exchange factor), NPY2R (neuropeptide Y receptor Y2), IGFBP2 (insulin-like growth factor binding protein 2, 36 kDa), CD28 (CD28 molecule), GSTA1 (glutathione S-transferase alpha 1), PPIA (peptidylprolyl isomerase A (cyclophilin A)), APOH (apolipoprotein H (beta-2-glycoprotein I)), S100A8 (S100 calcium binding protein A8), IL11 (interleukin 11), ALOX15 (arachidonate 15-lipoxygenase), FBLN1 (fibulin 1), NR1H3 (nuclear receptor subfamily 1, group H, member 3), SCD (stearoyl-CoA desaturase (delta-9-desaturase)), GIP (gastric inhibitory polypeptide), CHGB (chromogranin B (secretogranin 1)), PRKCB (protein kinase C, beta), SRD5A1 (steroid-5-alpha-reductase, alpha polypeptide 1 (3-oxo-5 alpha-steroid delta 4-dehydrogenase alpha 1)), HSD11B2 (hydroxysteroid (11-beta) dehydrogenase 2), CALCRL (calcitonin receptor-like), GALNT2 (UDP-N-acetyl-alpha-D-galactosamine:polypeptide N-acetylgalactosaminyltransferase 2 (GalNAc-T2)), ANGPTL4 (angiopoietin-like 4), KCNN4 (potassium intermediate/small conductance calcium-activated channel, subfamily N, member 4), PIK3C2A (phosphoinositide-3-kinase, class 2, alpha polypeptide), HBEGF (heparin-binding EGF-like growth factor), CYP7A1 (cytochrome P450, family 7, subfamily A, polypeptide 1), HLA-DRB5 (major histocompatibility complex, class II, DR beta 5), BNIP3 (BCL2/adenovirus E1B 19 kDa interacting protein 3), GCKR (glucokinase (hexokinase 4) regulator), S100A12 (S100 calcium binding protein A12), PADI4 (peptidyl arginine deiminase, type IV), HSPA14 (heat shock 70 kDa protein 14), CXCR1 (chemokine (C-X-C motif) receptor 1), H19 (H19, imprinted maternally expressed transcript (non-protein coding)), KRTAP19-3 (keratin associated protein 19-3), IDDM2 (insulin-dependent diabetes mellitus 2), RAC2 (ras-related C3 botulinum toxin substrate 2 (rho family, small GTP binding protein Rac2)), RYR1 (ryanodine receptor 1 (skeletal)), CLOCK (clock homolog (mouse)), NGFR (nerve growth factor receptor (TNFR superfamily, member 16)), DBH (dopamine beta-hydroxylase (dopamine beta-monooxygenase)), CHRNA4 (cholinergic receptor, nicotinic, alpha 4), CACNA1C (calcium channel, voltage-dependent, L type, alpha 1C subunit), PRKAG2 (protein kinase, AMP-activated, gamma 2 non-catalytic subunit), CHAT (choline acetyltransferase), PTGDS (prostaglandin D2 synthase 21 kDa (brain)), NR1H2 (nuclear receptor subfamily 1, group H, member 2), TEK (TEK tyrosine kinase, endothelial), VEGFB (vascular endothelial growth factor B), MEF2C (myocyte enhancer factor 2C), MAPKAPK2 (mitogen-activated protein kinase-activated protein kinase 2), TNFRSF11A (tumor necrosis factor receptor superfamily, member 1 1a, NFKB activator), HSPA9 (heat shock 70 kDa protein 9 (mortalin)), CYSLTR1 (cysteinyl leukotriene receptor 1), MAT1A (methionine adenosyltransferase I, alpha), OPRL1 (opiate receptor-like 1), IMPA1 (inositol(myo)-1(or 4)-monophosphatase 1), CLCN2 (chloride channel 2), DLD (dihydrolipoamide dehydrogenase), PSMA6 (proteasome (prosome, macropain) subunit, alpha type, 6), PSMB8 (proteasome (prosome, macropain) subunit, beta type, 8 (large multifunctional peptidase 7)), CHI3L1 (chitinase 3-like 1 (cartilage glycoprotein-39)), ALDH1B1 (aldehyde dehydrogenase 1 family, member B1), PARP2 (poly (ADP-ribose) polymerase 2), STAR (steroidogenic acute regulatory protein), LBP (lipopolysaccharide binding protein), ABCC6 (ATP-binding cassette, sub-family C(CFTR/MRP), member 6), RGS2 (regulator of G-protein signaling 2, 24 kDa), EFNB2 (ephrin-B2), GJB6 (gap junction protein, beta 6, 30 kDa), APOA2 (apolipoprotein A-II), AMPD1 (adenosine monophosphate deaminase 1), DYSF (dysferlin, limb girdle muscular dystrophy 2B (autosomal recessive)), FDFT1 (farnesyl-diphosphate farnesyltransferase 1), EDN2 (endothelin 2), CCR6 (chemokine (C-C motif) receptor 6), GJB3 (gap junction protein, beta 3, 31 kDa), IL1RL1 (interleukin 1 receptor-like 1), ENTPD1 (ectonucleoside triphosphate diphosphohydrolase 1), BBS4 (Bardet-Biedl syndrome 4), CELSR2 (cadherin, EGF LAG seven-pass G-type receptor 2 (flamingo homolog, Drosophila)), F11R (F11 receptor), RAPGEF3 (Rap guanine nucleotide exchange factor (GEF) 3), HYAL1 (hyaluronoglucosaminidase 1), ZNF259 (zinc finger protein 259), ATOX1 (ATX1 antioxidant protein 1 homolog (yeast)), ATF6 (activating transcription factor 6), KHK (ketohexokinase (fructokinase)), SAT1 (spermidine/spermine N1-acetyltransferase 1), GGH (gamma-glutamyl hydrolase (conjugase, folylpolygammaglutamyl hydrolase)), TIMP4 (TIMP metallopeptidase inhibitor 4), SLC4A4 (solute carrier family 4, sodium bicarbonate cotransporter, member 4), PDE2A (phosphodiesterase 2A, cGMP-stimulated), PDE3B (phosphodiesterase 3B, cGMP-inhibited), FADS1 (fatty acid desaturase 1), FADS2 (fatty acid desaturase 2), TMSB4X (thymosin beta 4, X-linked), TXNIP (thioredoxin interacting protein), LIMS1 (LIM and senescent cell antigen-like domains 1), RHOB (ras homolog gene family, member B), LY96 (lymphocyte antigen 96), FOXO1 (forkhead box 01), PNPLA2 (patatin-like phospholipase domain containing 2), TRH (thyrotropin-releasing hormone), GJC1 (gap junction protein, gamma 1, 45 kDa), SLC17A5 (solute carrier family 17 (anion/sugar transporter), member 5), FTO (fat mass and obesity associated), GJD2 (gap junction protein, delta 2, 36 kDa), PSRC1 (proline/serine-rich coiled-coil 1), CASP12 (caspase 12 (gene/pseudogene)), GPBAR1 (G protein-coupled bile acid receptor 1), PXK (PX domain containing serine/threonine kinase), IL33 (interleukin 33), TRIB1 (tribbles homolog 1 (Drosophila)), PBX4 (pre-B-cell leukemia homeobox 4), NUPR1 (nuclear protein, transcriptional regulator, 1), 15-Sep (15 kDa selenoprotein), CILP2 (cartilage intermediate layer protein 2), TERC (telomerase RNA component), GGT2 (gamma-glutamyltransferase 2), MT-CO1 (mitochondrially encoded cytochrome c oxidase I), and UOX (urate oxidase, pseudogene). In an additional embodiment, the chromosomal sequence may further be selected from Pon1 (paraoxonase 1), LDLR (LDL receptor), ApoE (Apolipoprotein E), Apo B-100 (Apolipoprotein B-100), ApoA (Apolipoprotein(a)), ApoA1 (Apolipoprotein A1), CBS (Cystathione B-synthase), Glycoprotein IIb/IIb, MTHRF (5,10-methylenetetrahydrofolate reductase (NADPH), and combinations thereof. In one iteration, the chromosomal sequences and proteins encoded by chromosomal sequences involved in cardiovascular disease may be chosen from Cacna1C, Sod1, Pten, Ppar(alpha), Apo E, Leptin, and combinations thereof. The text herein accordingly provides exemplary targets as to CRISPR or CRISPR-Cas systems or complexes.

[1632] Each of these patents, patent publications, and applications, and all documents cited therein or during their prosecution (“appln cited documents”) and all documents cited or referenced in the appln cited documents, together with any instructions, descriptions, product specifications, and product sheets for any products mentioned therein or in any document therein and incorporated by reference herein, are hereby incorporated herein by reference, and may be employed in the practice of the invention. All documents (e.g., these patents, patent publications and applications and the appln cited documents) are incorporated herein by reference to the same extent as if each individual document was specifically and individually indicated to be incorporated by reference.

### Research Program

[1633] The subject invention may be used as part of a research program wherein there is transmission of results or data. A computer system (or digital device) may be used to receive, transmit, display and/or store results, analyze the data and/or results, and/or produce a report of the results and/or data and/or analysis. A computer system may be understood as a logical apparatus that can read instructions from media (e.g. software) and/or network port (e.g. from the internet), which can optionally be connected to a server having fixed media. A computer system may comprise one or more of a CPU, disk drives, input devices such as keyboard and/or mouse, and a display (e.g. a monitor). Data communication, such as transmission of instructions or reports, can be achieved through a communication medium to a server at a local or a remote location. The communication medium can include any means of transmitting and/or receiving data. For example, the communication medium can be a network connection, a wireless connection, or an internet connection. Such a connection can provide for communication over the World Wide Web. It is envisioned that data relating to the present invention can be transmitted over such networks or connections (or any other suitable means for transmitting information, including but not limited to mailing a physical report, such as a print-out) for reception and/or for review by a receiver. The receiver can be but is not limited to an individual, or electronic system (e.g. one or more computers, and/or one or more servers). In some embodiments, the computer system comprises one or more processors. Processors may be associated with one or more controllers, calculation units, and/or other units of a computer system, or implanted in firmware as desired. If implemented in software, the routines may be stored in any computer readable memory such as in RAM, ROM, flash memory, a magnetic disk, a laser disk, or other suitable storage medium. Likewise, this software may be delivered to a computing device via any known delivery method including, for example, over a communication channel such as a telephone line, the internet, a wireless connection, etc., or via a transportable medium, such as a computer readable disk, flash drive, etc. The various steps may be implemented as various blocks, operations, tools, modules and techniques which, in turn, may be implemented in hardware, firmware, software, or any combination of hardware, firmware, and/or software. When implemented in hardware, some or all of the blocks, operations, techniques, etc. may be implemented in, for example, a custom integrated circuit (IC), an application specific integrated circuit (ASIC), a field programmable logic array (FPGA), a programmable logic array (PLA), etc. A client-server, relational database architecture can be used in embodiments of the invention. A client-server architecture is a network architecture in which each computer or process on the network is either a client or a server. Server computers are typically powerful computers dedicated to managing disk drives (file servers), printers (print servers), or network traffic (network servers). Client computers include PCs (personal computers) or workstations on which users run applications, as well as example output devices as disclosed herein. Client computers rely on server computers for resources, such as files, devices, and even processing power. In some embodiments of the invention, the server computer handles all of the database functionality. The client computer can have software that handles all the front-end data management and can also receive data input from users. A machine readable medium comprising computer-executable code may take many forms, including but not limited to, a tangible storage medium, a carrier wave medium or physical transmission medium. Non-volatile storage media include, for example, optical or magnetic disks, such as any of the storage devices in any computer(s) or the like, such as may be used to implement the databases, etc. shown in the drawings. Volatile storage media include dynamic memory, such as main memory of such a computer platform. Tangible transmission media include coaxial cables; copper wire and fiber optics, including the wires that comprise a bus within a computer system. Carrier-wave transmission media may take the form of electric or electromagnetic signals, or acoustic or light waves such as those generated during radio frequency (RF) and infrared (IR) data communications. Common forms of computer-readable media therefore include for example: a floppy disk, a flexible disk, hard disk, magnetic tape, any other magnetic medium, a CD-ROM, DVD or DVD-ROM, any other optical medium, punch cards paper tape, any other physical storage medium with patterns of holes, a RAM, a ROM, a PROM and EPROM, a FLASH-EPROM, any other memory chip or cartridge, a carrier wave transporting data or instructions, cables or links transporting such a carrier wave, or any other medium from which a computer may read programming code and/or data. Many of these forms of computer readable media may be involved in carrying one or more sequences of one or more instructions to a processor for execution. Accordingly, the invention comprehends performing any method herein-discussed and storing and/or transmitting data and/or results therefrom and/or analysis thereof, as well as products from performing any method herein-discussed, including intermediates.

[1634] The present application also provides aspects and embodiments as set forth in the following numbered Statements:

[1635] Statement 1. A method of reducing immunogenicity of a Cas protein which comprises mutating one or more immunogenic T cell epitopes.

[1636] Statement 2. The method of Statement 1, wherein T cell epitopes are ordered by determining immunogenicity and one or more of the ten most immunogenic T cell epitopes are mutated.

[1637] Statement 3. The method of any one of Statement 1-2, wherein determining immunogenicity comprises measuring affinity of a peptide containing the epitope for one or more MHC molecule.

[1638] Statement 4. The method of any one of Statement 1-3, wherein determining immunogenicity comprises comparing a peptide containing the epitope to a host proteome.

[1639] Statement 5. The method of any one of Statement 1-4, which comprises mutating Cas proteins containing one or more mutations at one or more amino acid positions and screening the mutant proteins for one or more Cas activities.

[1640] Statement 6. The method of Statement 5, wherein the mutating and screening are performed using a phage display system.

[1641] Statement 7. The method of Statement 5, wherein the mutating and screening are performed using phage-assisted continuous evolution (PACE).

[1642] Statement 8. The method of any one of Statement 1-7, wherein nuclease activity of the Cas protein is preserved.

[1643] Statement 9. The method of any one of Statement 1-8, wherein one or more active site residues are unchanged.

[1644] Statement 10. The method of any one of Statement 1-9, wherein one or more residues that determine complex formation with a guide are unchanged.

[1645] Statement 11. The method of any one of Statement 1-10, wherein target specificity of a CRISPR system comprising the Cas protein is maintained or increased.

[1646] Statement 12. The method of any one of Statement 1-11, which comprises deleting, inserting, or mutating one or more amino acids in the immunogenic T cell epitope.

[1647] Statement 13. The method of any one of Statement 1-12, wherein identification of a T cell epitope comprises determining the sequence of one or more peptides from the Cas protein that bind to an MHC receptor.

[1648] Statement 14. The method of any one of Statement 1-13, wherein identification of a T cell epitope comprises comparison of the CRISPR protein to a database of peptides that bind to an MHC receptor.

[1649] Statement 15. The method of Statement 14, wherein the comparison is in silico.

[1650] Statement 16. The method of Statement 13 wherein the MHC receptor is a class I MHC receptor.

[1651] Statement 17. The method of Statement 13, wherein the MHC receptor is a class II MHC receptor.

[1652] Statement 18. The method of any one of Statement 1-17, wherein the engineered Cas protein is a class 2 Cas protein.

[1653] Statement 19. The method of any one of Statement 1-18, wherein the engineered Cas protein is Type II, Type V, or Type VI Cas protein.

[1654] Statement 20. The method of any one of Statement 1-19, wherein the Cas protein comprises Cas9, Cas12a, Cas12b, Cas13a, Cas13b, or Cas13c.

[1655] Statement 21. The method of any one of Statement 1-20, wherein the Cas protein is associated with a functional domain.

[1656] Statement 22. The method of Statement 21, wherein the functional domain comprises a mutation that reduces immunogenicity.

[1657] Statement 23. The method of Statement 21, wherein the functional domain comprises an activator, a repressor, or a DNA methylase.

[1658] Statement 24. The method of Statement 21, wherein the functional domain comprises a base editor.

[1659] Statement 25. An engineered Cas protein which comprises at least one mutated T cell epitope, wherein the T cell epitope has reduced immunogenicity as compared to the corresponding T cell epitope of a naturally occurring Cas protein, whereby the engineered Cas protein comprises reduced immunogenicity as compared to the naturally occurring Cas protein.

[1660] Statement 26. The engineered Cas protein of Statement 25, wherein immunogenicity of the T cell epitope is measured in silico.

[1661] Statement 27. The engineered Cas protein of any one of Statements 25-26, wherein the immunogenicity of the CRISPR protein is measured in a host.

[1662] Statement 28. A polypeptide comprising an engineered Cas protein having reduced immunogenicity compared to a naturally occurring Cas protein.

[1663] Statement 29. The polypeptide of Statement 28, wherein the Cas protein comprises at least one T cell epitope mutation.

[1664] Statement 30. The polypeptide of Statement 29, wherein the mutation comprises an insertion, deletion, or substitution.

[1665] Statement 31. The polypeptide of any one of Statements 28-30, wherein the Cas protein is glycosylated.

[1666] Statement 32. The polypeptide of any one of Statements 28-31, wherein the polypeptide comprises one or more nuclear localization signals (NLS).

[1667] Statement 33. The polypeptide of any one of Statements 28-32, wherein the engineered Cas protein comprises a Cas nuclease catalytic site.

[1668] Statement 34. The polypeptide of any one of Statements 28-33, wherein the engineered Cas protein is a nickase.

[1669] Statement 35. The polypeptide of any one of Statements 28-34, wherein the engineered Cas protein is catalytically inactive.

[1670] Statement 36. The polypeptide of any one of Statements 28-35, wherein the engineered Cas protein is a class 2 Cas protein.

[1671] Statement 37. The polypeptide of any one of Statements 28-36, wherein the engineered Cas protein is Type II, Type V, or Type VI Cas protein.

[1672] Statement 38. The polypeptide of any one of Statements 28-37, wherein the engineered Cas protein is Cas9, Cas12, or Cas13.

[1673] Statement 39. The polypeptide of any one of Statements 28-38, wherein the Cas protein is Cas9.

[1674] Statement 40. The polypeptide of Statement 39, wherein the Cas9 is from Corynebacter, Sutterella, Legionella, Treponema, Filifactor, Eubacterium, Streptococcus, Lactobacillus, Mycoplasma, Bacteroides, Flaviivola, Flavobacterium, Sphaerochaeta, Azospirillum, Gluconacetobacter, Neisseria, Roseburia, Parvibaculum, Staphylococcus, Nitratifractor, or Campylobacter.

[1675] Statement 41. The polypeptide of any one of Statements 39-40, wherein the Cas9 comprises a mutation at D10, E762, H840, N854, N863, or D986 with reference to the position numbering of a Streptococcus pyogenes Cas9.

[1676] Statement 42. The polypeptide of Statement 41, wherein the mutation comprises D10A, E762A, H840A, N854A, N863A or D986A.

[1677] Statement 43. The polypeptide of any one of Statements 28-38, wherein the Cas protein is Cas12a.

[1678] Statement 44. The polypeptide of Statement 43, wherein the Cas12a is from Francisella tularensis 1, Prevotella albensis, Lachnospiraceae bacterium MC2017 1, Butyrivibrio proteoclasticus, Peregrinibacteria bacterium GW2011_GWA2_33_10, Parcubacteria bacterium GW2011_GWC2_44_17, Smithella sp. SCADC, Acidaminococcus sp. BV3L6, Lachnospiraceae bacterium MA2020, Candidatus Methanoplasma termitum, Eubacterium eligens, Moraxella bovoculi 237, Leptospira inadai, Lachnospiraceae bacterium ND2006, Porphyromonas crevioricanis 3, Prevotella disiens, or Porphyromonas macacae.

[1679] Statement 45. The polypeptide of any one of Statements 28-38, wherein the Cas protein is Cas12b.

[1680] Statement 46. The polypeptide of Statement 45, wherein the Cas12b is from Alicyclobacillus, Desulfovibrio, Desulfonatronum, Opitutaceae, Tuberibacillus, Bacillus, Brevibacillus, Candidatus, Desulfatirhabdium, Elusimicrobia, Citrobacter, Methylobacterium, Omnitrophicai, Phycisphaerae, Planctomycetes, Spirochaetes, or Verrucomicrobiaceae.

[1681] Statement 47. The polypeptide of Statement 45 or 46, wherein the Cas12b comprises a mutation at R911, R1000, or R1015 with reference to the position numbering of a Alicyclobacillus acidoterrestris Cas12b.

[1682] Statement 48. The polypeptide of any one of Statements 28-38, wherein the Cas protein is Cas13.

[1683] Statement 49. The polypeptide of Statement 48, wherein the Cas13 is from Streptococcus, Campylobacter, Nitratifractor, Staphylococcus, Parvibaculum, Roseburia, Neisseria, Gluconacetobacter, Azospirillum, Sphaerochaeta, Lactobacillus, Eubacterium, Corynebacter, Carnobacterium, Rhodobacter, Listeria, Paludibacter, Clostridium, Lachnospiraceae, Clostridiaridium, Leptotrichia, Francisella, Legionella, Alicyclobacillus, Methanomethyophilus, Porphyromonas, Prevotella, Bacteroidetes, Helcococcus, Letospira, Desulfovibrio, Desulfonatronum, Opitutaceae, Tuberibacillus, Bacillus, Brevibacilus, Methylobacterium or Acidaminococcus.

[1684] Statement 50. A nucleic acid encoding the engineered Cas protein of any one of Statements 28-49.

[1685] Statement 51. A cell comprising the nucleic acid of Statement 50.

[1686] Statement 52. A composition comprising an engineered Cas protein or a nucleotide sequence encoding the Cas protein, and at least one guide designed to form a complex with the Cas protein or at least one nucleotide sequence encoding the at least one guide, wherein the guide is designed to hybridize with a target sequence of a DNA molecule in a cell.

[1687] Statement 53. The composition of Statement 52, wherein the Cas protein is Cas9, Cas12, or Cas13.

[1688] Statement 54. The composition of any one of Statements 52-53, wherein the Cas protein comprises one or more nuclear localization signals (NLSs).

[1689] Statement 55. The composition of any one of Statements 52-54, wherein the guide comprises a chimeric RNA.

[1690] Statement 56. The composition of any one of Statements 52-55, wherein the guide comprises a crRNA and a tracrRNA.

[1691] Statement 57. The composition of any one of Statements 52-56, further comprising a homologous recombination (HR) template.

[1692] Statement 58. The composition of any one of Statements 52-57, wherein the Cas protein is associated with one or more functional domains.

[1693] Statement 59. The composition of any one of Statements 52-58, wherein the Cas protein is associated with one or more functional domains; and the Cas protein comprises one or more mutations within a RuvC and/or Nuc domain, whereby the complex can deliver an epigenetic modifier or a transcriptional or translational activation or repression signal.

[1694] Statement 60. The composition of any one of Statements 52-59, wherein the Cas protein is associated with adenosine deaminase or cytidine deaminase.

[1695] Statement 61. The composition of any one of Statements 52-60, wherein the cell is a mammalian cell.

[1696] Statement 62. The composition of any one of Statements 52-61, wherein the cell is a human cell.

[1697] Statement 63. The composition of any one of Statements 52-62, wherein the Cas protein is Cas13, and optionally the Cas13 comprises one or more mutations within an HEPN domain, such as R597A, H602A, R1278A, and/or H1283A, whereby the complex can deliver an epigenetic modifier or a transcriptional or translational activation or repression signal.

[1698] Statement 64. A vector system for providing the composition of Statements 52-63, which comprises one or more vectors comprising: a first regulatory element operably linked to a nucleotide sequence encoding a deimmunized Cas protein, and i) a) a second regulatory element operably linked to a nucleotide sequence encoding the crRNA, and b) a third regulatory element operably linked to a nucleotide sequence encoding the tracrRNA, ii) a second regulatory element operably linked to a nucleotide sequence encoding the crRNA and the tracr RNA, or iii) a second regulatory element operably linked to a nucleotide sequence encoding a guide sequence.

[1699] Statement 65. The vector system of Statement 64, wherein the nucleotide sequence encoding the Cas protein is codon optimized for expression in a eukaryotic cell.

[1700] Statement 66. The vector system of any one of Statements 64-65, wherein the one or more vectors comprise one or more viral vectors.

[1701] Statement 67. The vector system of any one of Statements 64-66, wherein the one or more vectors comprise one or more retroviral, lentiviral, adenoviral, adeno-associated or herpes simplex viral vectors.

[1702] Statement 68. A delivery system configured to deliver an engineered Cas protein having reduced immunogenicity compared to a naturally occurring Cas protein and one or more nucleic acid components of a composition comprising: a) the engineered Cas protein, and b) i) a crRNA comprising a) a 5′ guide sequence designed to hybridize to a target DNA sequence, and b) a 3′ direct repeat sequence, and ii) a tracr RNA, or a guide, whereby there is formed a CRISPR complex comprising the Cas protein complexed with the crRNA and the tracr RNA, or the guide.

[1703] Statement 69. The delivery system of Statement 68, wherein the Cas protein is a Type II, Type V, or Type VI Cas protein.

[1704] Statement 70. The delivery system of any one of Statements 68-69, wherein the Cas protein is Cas9, Cas12, or Cas13.

[1705] Statement 71. The delivery system of any one of Statements 68-70, which comprises one or more vectors or one or more polynucleotide molecules, the one or more vectors or polynucleotide molecules comprising one or more polynucleotide molecules encoding the Cas protein and one or more nucleic acid components of the non-naturally occurring or engineered composition.

[1706] Statement 72. The delivery system of any one of Statements 68-71, which comprises a delivery vehicle comprising liposome(s), particle(s), exosome(s), microvesicle(s), a gene-gun or one or more viral vector(s).

[1707] Statement 73. An engineered Cas protein which comprises at least one mutated T cell epitope, wherein the T cell epitope has reduced immunogenicity as compared to the corresponding T cell epitope of a naturally occurring Cas protein, whereby the engineered Cas protein comprises reduced immunogenicity as compared to the naturally occurring Cas protein.

[1708] Statement 74. The engineered Cas protein of any one of Statements 68-73, wherein the Cas protein is wherein the Cas protein is a Type II, Type V, or Type VI Cas protein.

[1709] Statement 75. The engineered Cas protein of any one of Statements 68-74, wherein the Cas protein is Cas9, Cas12, or Cas13.

[1710] Statement 76. The engineered Cas protein of any one of Statements 68-75, wherein immunogenicity of the T cell epitope is measured in silico.

[1711] Statement 77. The engineered Cas protein of any one of Statements 68-76, wherein the immunogenicity of the Cas protein is measured in a host.

[1712] Statement 78. A method of modifying a target nucleic acid, the method comprising contacting the target DNA with one or more engineered compositions comprising: a) an engineered Cas protein of any one of Statements 68-77, having reduced immunogenicity compared to a naturally occurring Cas protein, b i) a crRNA comprising a) a guide sequence designed to hybridize to the target DNA sequence, and b) a direct repeat sequence, and ii) optionally a tracr RNA, or a guide, whereby there is formed a CRISPR complex comprising the Cas protein complexed with the crRNA and, optionally, with the tracr RNA, or the guide, wherein the guide sequence directs sequence-specific binding to the target DNA sequence in a cell, whereby expression of the target locus of interest is modified.

[1713] Statement 79. The method of Statement 78, wherein modifying expression of the target gene comprises cleaving the target nucleic acid.

[1714] Statement 80. The method of any one of Statements 78-79, wherein modifying expression of the target gene comprises increasing or decreasing expression of the target nucleic acid.

[1715] Statement 81. The method of any one of Statements 78-80, wherein the target nucleic acid is DNA or RNA.

[1716] Statement 82. The method of any one of Statements 78-81, wherein the target gene is in a prokaryotic cell.

[1717] Statement 83. The method of any one of Statements 78-82, wherein the target gene is in a eukaryotic cell.

[1718] Statement 84. The method of any one of Statements 78-83, wherein the target gene is in a mammalian cell or a human cell.

[1719] Statement 85. A cell comprising a modified target of interest, wherein the target of interest has been modified according to the method of any one of Statements 78-84.

[1720] Statement 86. A method of modifying a target DNA in a mammal, which comprises delivering the system of any one of Statements 68-72.

[1721] Statement 87. The method of Statement 86, wherein the mammal is a human, a non-human primate, a canine, a feline, an bovine, a porcine, an ovine, a rat, a mouse.

[1722] Statement 88. The method of any one of Statements 86-87, which further comprises inducing tolerance to the Cas protein.

[1723] Statement 89. An engineered composition for site directed base editing comprising a targeting domain and a adenosine or cytidine deaminase, wherein the deaminase has reduced immunogenicity compared to a naturally occurring deaminase.

[1724] Statement 90. The composition of Statement 89, wherein the deaminase comprises at least one T cell epitope mutation.

[1725] Statement 91. The composition of Statement 90, wherein the mutation comprises an insertion, deletion, or substitution.

[1726] Statement 92. The composition of any of Statements 89-91, which further comprises a mutation of the targeting domain that reduces immunogenicity.

[1727] Statement 93. The composition of any of Statements 89-92, wherein the targeting domain is an oligonucleotide binding domain.

[1728] Statement 94. The composition of any of Statements 89-93, wherein the deaminase, or catalytic domain thereof, comprises one or more mutations that increase activity or specificity of the adenosine deaminase relative to wild type.

[1729] Statement 95. The composition of any of Statements 89-95, wherein the deaminase comprises one or more mutations that changes the functionality of the deaminase relative to wild type, preferably an ability of the deaminase to deaminate cytidine.

[1730] Statement 96. The composition of any of Statements 89-95, wherein the targeting domain is a CRISPR system comprising a Cas protein, or fragment thereof which retains DNA and/or RNA binding ability, and a guide molecule.

[1731] Statement 97. The composition of any of Statements 89-97, wherein the CRISPR system is catalytically inactive.

[1732] Statement 98. The composition of any of Statements 89-97, wherein the CRISPR system comprises an RNA-binding protein, preferably Cas13, preferably the Cas13 protein is Cas13a, Cas13b or Cas13c, preferably wherein said Cas13 comprises a Cas13 listed in any of Tables 4, 5, or 6 or is from a bacterial species listed in any of Tables 4, 5, or 6, preferably wherein said Cas13 protein comprises Prevotella sp. P5-125 Cas13b, Porphyromas gulae Cas13b, or Riemerella anatipestifer Cas13b; preferably Prevotella sp. P5-125 Cas13b.

[1733] Statement 99. The composition of any of Statements 89-98, wherein said guide molecule comprises a guide sequence is capable of hybridizing with a target RNA sequence comprising an Adenine to form an RNA duplex, wherein said guide sequence comprises a non-pairing Cytosine at a position corresponding to said Adenine resulting in an A-C mismatch in the RNA duplex formed.

[1734] Statement 100. The composition of Statement 99, wherein said Cas13 protein is a Cas13a protein and said Cas13a comprises one or more mutations the two HEPN domains, particularly at position R474 and R1046 of Cas13a protein originating from Leptotrichia wadei or amino acid positions corresponding thereto of a Cas13a ortholog, or wherein said Cas13 protein is a Cas13b protein and said Cas13b comprises a mutation in one or more of positions R116, H121, R1177, H1182, preferably R116A, H121A, R1177A, H1182A of Cas13b protein originating from Bergeyella zoohelcum ATCC 43767 or amino acid positions corresponding thereto of a Cas13b ortholog, or wherein said Cas13 protein is a Cas13b protein and said Cas13b comprises a mutation in one or more of positions R128, H133, R1053, H1058, preferably H133 and H1058, preferably H133A and H1058A, of a Cas13b protein originating from Prevotella sp. P5-125 or amino acid positions corresponding thereto of a Cas13b orthologs.

[1735] Statement 101. The composition of Statement 100, wherein said Cas13, preferably Cas13b, is truncated, preferably C-terminally truncated, preferably wherein said Cas13 is a truncated functional variant of the corresponding wild type Cas13, optionally wherein said truncated Cas13b is encoded by nt 1-984 of Prevotella sp. P5-125 Cas13b or the corresponding nt of a Cas13b orthologue or homologue.

[1736] Statement 102. The composition of any one of Statements 89-101, wherein said guide molecule comprises a guide sequence is capable of hybridizing with a target RNA sequence comprising a Cytidine to be edited to form an RNA duplex.

[1737] Statement 103. The composition of any one of Statements 89-102, wherein said guide sequence has a length of about 20-53 nt, preferably 25-53 nt, more preferably 29-53 nt or 40-50 nt capable of forming said RNA duplex with said target sequence, and/or wherein the distance between said non-pairing C and the 5′ end of said guide sequence is 20-30 nucleotides.

[1738] Statement 104. The composition of any one of Statements 89-103, wherein the guide sequence comprises more than one mismatch corresponding to different adenosine sites in the target RNA sequence or wherein two guide molecules are used, each comprising a mismatch corresponding to a different adenosine sites in the target RNA sequence.

[1739] Statement 105. The composition of any one of Statements 89-104, wherein cytidine deaminase protein or catalytic domain thereof is fused to a N- or C-terminus of said oligonucleotide binding protein, optionally by a linker, preferably where said linker is (GGGGS)3-11, GSG5, or LEPGEKPYKCPECGKSFSQSGALTRHQRTHTR, or wherein said linker is an XTEN, linker.

[1740] Statement 106. The composition of any one of Statements 89-105, wherein said cytidine deaminase protein or catalytic domain thereof is inserted into an internal loop of said dead Cas13 protein.

[1741] Statement 107. The composition of any one of Statements 89-106, wherein said cytidine deaminase protein or catalytic domain thereof is linked to an adaptor protein and said guide molecule or said dead Cas13 protein comprises an aptamer sequence capable of binding to said adaptor protein, preferably wherein said adaptor sequence is selected from MS2, PP7, Q3, F2, GA, fr, JP501, M12, R17, BZ13, JP34, JP500, KU1, M11, MX1, TW18, VK, SP, FI, ID2, NL95, TW19, AP205, ϕCb5, ϕCb8r, ϕCb12r, ϕCb23r, 7s and PRR1.

[1742] Statement 108. The composition of any one of Statements 89-107, wherein said targeting domain and optionally said cytidine deaminase or catalytic domain thereof comprise one or more heterologous nuclear export signal(s) (NES(s)) or nuclear localization signal(s) (NLS(s)), preferably an HIV Rev NES or MAPK NES, preferably C-terminal.

[1743] Statement 109. The composition of any one of Statements 89-108, wherein the Cas13 protein is truncated at a C terminus, an N terminus, or both.

[1744] Statement 110. The composition of Statement 109, wherein the Cas13 is truncated by at least 20, at least 40, at least 60, at least 80, at least 100, at least 120, at least 140, at least 160, at least 180, at least 200, at least 220, at least 240, at least 260, or at least 300 amino acids on the C terminus.

[1745] Statement 111. The composition of Statement 109, wherein the Cas13 is truncated by at least 20, at least 40, at least 60, at least 80, at least 100, at least 120, at least 140, at least 160, at least 180, at least 200, at least 220, at least 240, at least 260, or at least 300 amino acids on the N terminus.

[1746] Statement 112. The composition of Statement 109, wherein the truncated form of the Cas13 effector protein has been truncated at C-terminal Δ984-1090, C-terminal Δ1026-1090, C-terminal Δ1053-1090, C-terminal Δ934-1090, C-terminal Δ884-1090, C-terminal Δ834-1090, C-terminal Δ784-1090, or C-terminal Δ734-1090, wherein amino acid positions of the truncations correspond to amino acid positions of Prevotella sp. P5-125 Cas13b protein.

[1747] Statement 113. The composition of Statement 109, wherein the truncated form of the Cas13 effector protein has been truncated at C-terminal Δ795-1095, wherein amino acid positions of the truncation correspond to amino acid positions of Riemerella anatipestifer Cas13b protein.

[1748] Statement 114. The composition of Statement 109, wherein the truncated form of the Cas13 effector protein has been truncated at C-terminal Δ 875-1175, C-terminal Δ 895-1175, C-terminal Δ 915-1175, C-terminal Δ 935-1175, C-terminal Δ 955-1175, C-terminal Δ 975-1175, C-terminal Δ 995-1175, C-terminal Δ 1015-1175, C-terminal Δ 1035-1175, C-terminal Δ 1055-1175, C-terminal Δ 1075-1175, C-terminal Δ 1095-1175, C-terminal Δ 1115-1175, C-terminal Δ 1135-1175, C-terminal Δ 1155-1175, wherein amino acid positions correspond to amino acid positions of Porphyromonas gulae Cas13b protein.

[1749] Statement 115. The composition of Statement 109, wherein the truncated form of the Cas13 effector protein has been truncated at N-terminal Δ1-125, N-terminal Δ 1-88, or N-terminal Δ 1-72, wherein amino acid positions of the truncations correspond to amino acid positions of Prevotella sp. P5-125 Cas13b protein.

[1750] Statement 116. The composition of any one of Statements 89-115, wherein the adenosine deaminase is modified to convert activity to a cytidine deaminase.

[1751] Statement 117. The composition of Statement 116, wherein the adenosine deaminase is modified by one or more mutations at one or more positions selected from E396, C451, V351, R455, T375, K376, S486, Q488, R510, K594, R348, G593, S397, H443, L444, Y445, F442, E438, T448, A353, V355, T339, P539, V525 and 1520.

[1752] Statement 118. The composition of Statement 116 or 117, wherein the adenosine deaminase is mutated at one or more positions selected from E488, V351, S486, T375, S370, P462, and N597.

[1753] Statement 119. The composition of Statement 116, 117, or 118, wherein the adenosine deaminase comprises one or more mutations selected from E488Q, V351G, S486A, T375S, S370C, P462A, and N597I.

[1754] Statement 120. The composition of any one of Statements 89-119, wherein the adenosine deaminase protein or catalytic domain thereof is a human, cephalopod, or Drosophila adenosine deaminase protein or catalytic domain thereof.

[1755] Statement 121. The composition of any one of Statements 89-120, wherein said adenosine deaminase protein or catalytic domain thereof has been modified to comprise a mutation at glutamic acid488 of the hADAR2-D amino acid sequence, or a corresponding position in a homologous ADAR protein.

[1756] Statement 122. The composition of Statement 121, wherein said glutamic acid residue at position 488 or a corresponding position in a homologous ADAR protein is replaced by a glutamine residue (E488Q).

[1757] Statement 123. The composition of Statement 121 or 122, wherein said adenosine deaminase protein or catalytic domain thereof is a mutated hADAR2d comprising mutation E488Q or a mutated hADAR1d comprising mutation E1008Q.

[1758] Statement 124. The composition of any one of Statements 89-123, wherein the targeting domain is a catalytically inactive Cas13 protein, or a nucleotide sequence encoding said catalytically inactive Cas13 protein.

[1759] Statement 125. The composition of Statement 124, wherein the catalytically inactive Cas13 protein is catalytically inactive Cas13a, catalytically inactive Cas13b, or catalytically inactive Cas13c.

[1760] Statement 126. The composition of Statement 124 or 125, wherein the catalytically inactive Cas13 protein is obtained from a Cas13 nuclease derived from a bacterial species selected from the group consisting of the bacterial species listed in any of Tables 4, 5, or 6.

### EXAMPLES

### Example 1: T Cell Epitopes of SpCas9

[1761] NetMHCIIpan analysis of SpCas9 compared to DRB1_0101, DRB1*0301, DRB1*0401, DRB1*0701, DRB1*0801, DRB1*1101, DRB1*1301, DRB1*1501 using a sliding 15-amino acid window yielded 746 weak binders and 203 strong binders. The number of 9-mer cores is substantially smaller as each hit is encompassed by multiple overlapping windows. Overall, the MHC core sequences by MHC allele are as follows:

| SEQ | CORE | Affinity(nM) | %Rank |
|---|---|---|---|
| DRB1_0101 | | | |
| 880 | WRQLLNAKL | 14.05 | 1.40 |
| 950 | VITLKSKLV | 14.60 | 1.60 |
| DRB1_0301 | | | |
| 296 | ILLSDILRV | 78.30 | 1.10 |
| 639 | LFDDKVMKQ | 94.58 | 1.50 |
| 692 | LIHDDSLTF | 63.23 | 0.80 |
| 959 | LVSDFRKDF | 112.97 | 2.00 |
| 1278 | ILADANLDK | 27.41 | 0.05 |
| DRB1_0401 | | | |
| 287 | FLAAKNLSD | 34.77 | 0.15 |
| 1034 | FYSNIMNFF | 76.93 | 1.50 |
| 1043 | FKTEITLAN | 50.87 | 0.50 |
| 1232 | FKTEITLAN | 50.87 | 0.50 |
| DRB1_0701 | | | |
| 437 | IEKILTFRI | 36.82 | 1.70 |
| 1033 | FFYSNIMNF | 28.27 | 1.00 |
| 1232 | YLASHYEKL | 38.68 | 1.90 |
| DRB1_0801 | | | |
| 131 | IYHLRKKLV | 90.26 | 0.90 |
| 155 | LAHMIKFRG | 65.32 | 0.30 |
| 208 | ILSARLSKS | 70.58 | 0.40 |
| 330 | LKALVRQQL | 88.40 | 0.90 |
| 369 | YKFIKPILE | 82.70 | 0.70 |
| 437 | IEKILTFRI | 89.50 | 0.90 |
| 950 | VITLKSKLV | 103.73 | 1.40 |
| 1078 | FATVRKVLS | 67.47 | 0.40 |
| DRB1_1101 | | | |
| 131 | IYHLRKKLV | 24.33 | 0.50 |
| 154 | LAHMIKFRG | 20.02 | 0.30 |
| 208 | ILSARLSKS | 26.32 | 0.60 |
| 330 | LTLLKALVR | 35.09 | 1.20 |
| 369 | FYKFIKPIL | 35.49 | 1.30 |
| 549 | LFKTNRKVT | 42.32 | 1.70 |
| 646 | MKQLKRRRY | 35.39 | 1.30 |
| 654 | WGRLSRKLI | 32.27 | 1.00 |
| 950 | VITLKSKLV | 42.98 | 1.80 |
| 1077 | FATVRKVLS | 24.49 | 0.50 |
| DRB1_1301 | | | |
| 61 | LKRTARRRY | 22.39 | 0.80 |
| 131 | IYHLRKKLV | 30.75 | 1.80 |
| 154 | LAHMIKFRG | 25.42 | 1.10 |
| 207 | ILSARLSKS | 21.93 | 0.70 |
| 208 | ARLSKSRRL | 14.31 | 0.15 |
| 329 | LTLLKALVR | 20.57 | 0.60 |
| 437 | IEKILTFRI | 25.56 | 1.10 |
| 548 | LLFKTNRKV | 23.28 | 0.90 |
| 643 | MKQLKRRRY | 29.07 | 1.50 |
| 950 | VITLKSKLV | 25.15 | 1.10 |
| DRB_1501 | | | |
| 151 | IYLALAHMI | 52.63 | 1.50 |
| 156 | MIKFRGHFL | 36.11 | 0.60 |
| 437 | IEKILTFRI | 19.88 | 0.05 |
| 950 | VITLKSKLV | 40.26 | 0.80 |
| 1034 | FFYSNIMNF | 52.50 | 1.50 |
| 1232 | FLYLASHYE | 48.77 | 1.30 |

[1762] Various modifications and variations of the described methods, pharmaceutical compositions, and kits of the invention will be apparent to those skilled in the art without departing from the scope and spirit of the invention. Although the invention has been described in connection with specific embodiments, it will be understood that it is capable of further modifications and that the invention as claimed should not be unduly limited to such specific embodiments. Indeed, various modifications of the described modes for carrying out the invention that are obvious to those skilled in the art are intended to be within the scope of the invention. This application is intended to cover any variations, uses, or adaptations of the invention following, in general, the principles of the invention and including such departures from the present disclosure come within known customary practice within the art to which the invention pertains and may be applied to the essential features herein before set forth.

1. A method of reducing immunogenicity of a Cas protein which comprises mutating one or more immunogenic T cell epitopes.

2. The method of claim 1, wherein T cell epitopes are ordered by determining immunogenicity and one or more of the ten most immunogenic T cell epitopes are mutated.

3. The method of claim 2, wherein determining immunogenicity comprises
measuring affinity of a peptide containing the epitope for one or more MHC molecule;
and/or
comparing a peptide containing the epitope to a host proteome.

4. (canceled)

5. The method of claim 1, which comprises mutating the Cas proteins containing one or more mutations at one or more amino acid positions and screening the mutant proteins for one or more Cas activities.

6. (canceled)

7. (canceled)

8. The method of claim 1, wherein nuclease activity of the Cas protein is preserved.

9. The method of claim 1, wherein one or more active site residues are unchanged.

10. The method of claim 1, wherein one or more residues that determine complex formation with a guide are unchanged.

11. The method of claim 1, wherein target specificity of a CRISPR system comprising the Cas protein is maintained or increased.

12. The method of claim 1, which comprises deleting, inserting, or mutating one or more amino acids in the immunogenic T cell epitope.

13. The method of claim 1, wherein identification of a T cell epitope comprises
determining the sequence of one or more peptides from the Cas protein that bind to an MHC receptor; and/or
comparison of the CRISPR protein to a database of peptides that bind to an MHC receptor.

14. (canceled)

15. The method of claim 13, wherein the comparison is in silico.

16. The method of claim 13 wherein the MHC receptor is a class I MHC receptor or a class II MHC receptor.

17. (canceled)

18. The method of claim 1, wherein the engineered Cas protein is a class 2 Cas protein.

19. The method of claim 1, wherein the engineered Cas protein is Type II, Type V, or Type VI Cas protein.

20. The method of claim 1, wherein the Cas protein comprises Cas9, Cas12a, Cas12b, Cas13a, Cas13b, or Cas13c.

21. The method of claim 1, wherein the Cas protein is associated with a functional domain.

22. The method of claim 21, wherein the functional domain comprises:
a mutation that reduces immunogenicity;
an activator, a repressor, or a DNA methylase; and/or
a base editor.

23. (canceled)

24. (canceled)

25. An engineered Cas protein which comprises at least one mutated T cell epitope, wherein the T cell epitope has reduced immunogenicity as compared to the corresponding T cell epitope of a naturally occurring Cas protein, whereby the engineered Cas protein comprises reduced immunogenicity as compared to the naturally occurring Cas protein.

26. (canceled)

27. The engineered Cas protein of claim 25, wherein the immunogenicity of the CRISPR protein is measured in a host.

28. (canceled)

29. The polypeptide of claim 25, wherein the Cas protein comprises at least one T cell epitope mutation.

30. The polypeptide of claim 29, wherein the mutation comprises an insertion, deletion, or substitution.

31. The polypeptide of claim 25, wherein the Cas protein is glycosylated.

32. The polypeptide of claim 25, wherein the polypeptide comprises one or more nuclear localization signals (NLS).

33. The polypeptide of claim 25, wherein the engineered Cas protein:
comprises a Cas nuclease catalytic site;
is a nickase; or
is catalytically inactive.

34. (canceled)

35. (canceled)

36. (canceled)

37. (canceled)

38. (canceled)

39. (canceled)

40. (canceled)

41. (canceled)

42. (canceled)

43. (canceled)

44. (canceled)

45. (canceled)

46. (canceled)

47. (canceled)

48. (canceled)

49. (canceled)

50. A nucleic acid encoding the engineered Cas protein of claim 28.

51. A cell comprising the nucleic acid of claim 50.

52. A composition comprising the engineered Cas protein of claim 25 or a nucleotide sequence encoding the Cas protein, and at least one guide designed to form a complex with the Cas protein or at least one nucleotide sequence encoding the at least one guide, wherein the guide is designed to hybridize with a target sequence of a DNA molecule in a cell.

53. (canceled)

54. (canceled)

55. The composition of claim 52, wherein the guide comprises
a chimeric RNA; or
a crRNA and a tracrRNA.

56. (canceled)

57. The composition of claim 52, further comprising a homologous recombination (HR) template.

58. (canceled)

59. (canceled)

60. (canceled)

61. (canceled)

62. (canceled)

63. (canceled)

64. A vector system for providing the composition of claim 52, which comprises one or more vectors comprising:
a first regulatory element operably linked to a nucleotide sequence encoding a deimmunized Cas protein, and
i) a) a second regulatory element operably linked to a nucleotide sequence encoding the crRNA, and
b) a third regulatory element operably linked to a nucleotide sequence encoding the tracrRNA,
ii) a second regulatory element operably linked to a nucleotide sequence encoding the crRNA and the tracr RNA, or
iii) a second regulatory element operably linked to a nucleotide sequence encoding a guide sequence.

65. (canceled)

66. (canceled)

67. The vector system of claim 64, wherein the one or more vectors comprise one or more retroviral, lentiviral, adenoviral, adeno-associated or herpes simplex viral vectors.

68. A delivery system configured to deliver an engineered Cas protein of claim 25 or a coding sequence thereof,
i) a crRNA comprising a) a 5′ guide sequence designed to hybridize to a target DNA sequence, and b) a 3′ direct repeat sequence, and ii) a tracr RNA, or
a guide,
whereby there is formed a CRISPR complex comprising the Cas protein complexed with the crRNA and the tracr RNA, or the guide.

69. (canceled)

70. (canceled)

71. (canceled)

72. The delivery system of claim 68, which comprises a delivery vehicle comprising liposome(s), particle(s), exosome(s), microvesicle(s), a gene-gun or one or more viral vector(s).

73. (canceled)

74. (canceled)

75. (canceled)

76. (canceled)

77. (canceled)

78. A method of modifying a target nucleic acid, the method comprising contacting the target nucleic acid with one or more engineered compositions comprising:
a) an engineered Cas protein of claim 73, having reduced immunogenicity compared to a naturally occurring Cas protein,
b i) a crRNA comprising a) a guide sequence designed to hybridize to the target DNA sequence, and b) a direct repeat sequence, and ii) optionally a tracr RNA, or
a guide,
whereby there is formed a CRISPR complex comprising the Cas protein complexed with the crRNA and, optionally, with the tracr RNA, or the guide,
wherein the guide sequence directs sequence-specific binding to the target nucleic acid sequence in a cell, whereby expression of the target locus of interest is modified.

79. (canceled)

80. (canceled)

81. (canceled)

82. (canceled)

83. (canceled)

84. (canceled)

85. A cell comprising a modified target of interest, wherein the target of interest has been modified according to the method of claim 78.

86. A method of modifying a target DNA in a mammal, which comprises delivering the system of claim 68.

87. The method of claim 86, wherein the mammal is a human, a non-human primate, a canine, a feline, an bovine, a porcine, an ovine, a rat, a mouse.

88. The method of claim 86, which further comprises inducing tolerance to the Cas protein.

89. An engineered composition for site directed base editing comprising a targeting domain and a adenosine or cytidine deaminase, wherein the deaminase has reduced immunogenicity compared to a naturally occurring deaminase.

90-126. (canceled)

The application's sequence listing, which the Patent Office published only in electronic form, follows.

SEQUENCE LISTING (269 sequences)

SEQ ID NO: 1 - protein, 1363 aa, Steptococcus pyogenes
MDKKYSIGLDIGTNSVGWAVITDEYKVPSKKFKVLGNTDRHSIKKNLIGALLFDSGETAEATRLKRTARRRYTRRKNRICYLQEIFSNEMAKVDDSFFHRLEESFLVEEDKKHERHPIFGNIVDEVAYHEKYPTIYHLRKKLVDSTDKADLRLIYLALAHMIKFRGHFLIEGDLNPDNSDVDKLFIQLVQTYNQLFEENPINASGVDAKAILSARLSKSRRLENLIAQLPGEKKNGLFGNLIALSLGLTPNFKSNFDLAEDAKLQLSKDTYDDDLDNLLAQIGDQYADLFLAAKNLSDAILLSDILRVNTEITKAPLSASMIKRYDEHHQDLTLLKALVRQQLPEKYKEIFFDQSKNGYAGYIDGGASQEEFYKFIKPILEKMDGTEELLVKLNREDLLRKQRTFDNGSIPHQIHLGELHAILRRQEDFYPFLKDNREKIEKILTFRIPYYVGPLARGNSRFAWMTRKSEETITPWNFEEVVDKGASAQSFIERMTNFDKNLPNEKVLPKHSLLYEYFTVYNELTKVKYVTEGMRKPAFLSGEQKKAIVDLLFKTNRKVTVKQLKEDYFKKIECFDSVEISGVEDRFNASLGTYHDLLKIIKDKDFLDNEENEDILEDIVLTLTLFEDREMIEERLKTYAHLFDDKVMKQLKRRRYTGWGRLSRKLINGIRDKQSGKTILDFLKSDGFANRNFMQLIHDDSLTFKEDIQKAQVSGQGDSLHEHIANLAGSPAIKKGILQTVKVVDELVKVMGRHKPENIVIEMARENQTTQKGQKNSRERMKRIEEGIKELGSQILKEHPVENTQLQNEKLYLYYLQNGRDMYVDQELDINRLSDYDVDHIVPQSFLKDDSIDNKVLTRSDKNRGKSDNVPSEEVVKKMKNYWRQLLNAKLITQRKFDNLTKAERGGLSELDKAGFIKRQLVETRQITKHVAQILDSRMNTKYDENDKLIREVKVITLKSKLVSDFRKDFQFYKVREINNYHHAHDAYLNAVVGTALIKKYPKLESEFVYGDYKVYDVRKMIAKSEQEIGKATAKYFFYSNIMNFFKTEITLANGEIRKRPLIETNGETGEIVWDKGRDFATVRKVLSMPQVNIVKKTEVQTGGFSKESILPKRNSDKLIARKKDWDPKKYGGFDSPTVAYSVLVVAKVEKGKSKKLKSVKELLGITIMERSSFEKNPIDFLEAKGYKEVKKDLIIKLPKYSLFELENGRKRMLASAGELQKGNELALPSKYVNFLYLASHYEKLKGSPEDNEQKQLFVEQHKHYLDEIIEQISEFSKRVILADANLDKVLSAYNKHRDKPIREQAENIIHLFTLTNLGAPAAFKYFDTTIDRKRYTSTKEVLDATLIHQSITGLYETRIDLS

SEQ ID NO: 2 - protein, 1053 aa, Staphylococcus aureus
MKRNYILGLDIGITSVGYGIIDYETRDVIDAGVRLFKEANVENNEGRRSKRGARRLKRRRRHRIQRVKKLLFDYNLLTDHSELSGINPYEARVKGLSQKLSEEEFSAALLHLAKRRGVHNVNEVEEDTGNELSTKEQISRNSKALEEKYVAELQLERLKKDGEVRGSINRFKTSDYVKEAKQLLKVQKAYHQLDQSFIDTYIDLLETRRTYYEGPGEGSPFGWKDIKEWYEMLMGHCTYFPEELRSVKYAYNADLYNALNDLNNLVITRDENEKLEYYEKFQIIENVFKQKKKPTLKQIAKEILVNEEDIKGYRVTSTGKPEFTNLKVYHDIKDITARKEIIENAELLDQIAKILTIYQSSEDIQEELTNLNSELTQEEIEQISNLKGYTGTHNLSLKAINLILDELWHTNDNQIAIFNRLKLVPKKVDLSQQKEIPTTLVDDFILSPVVKRSFIQSIKVINAIIKKYGLPNDIIIELAREKNSKDAQKMINEMQKRNRQTNERIEEIIRTTGKENAKYLIEKIKLHDMQEGKCLYSLEAIPLEDLLNNPFNYEVDHIIPRSVSFDNSFNNKVLVKQEENSKKGNRTPFQYLSSSDSKISYETFKKHILNLAKGKGRISKTKKEYLLEERDINRFSVQKDFINRNLVDTRYATRGLMNLLRSYFRVNNLDVKVKSINGGFTSFLRRKWKFKKERNKGYKHHAEDALIIANADFIFKEWKKLDKAKKVMENQMFEEKQAESMPEIETEQEYKEIFITPHQIKHIKDFKDYKYSHRVDKKPNRELINDTLYSTRKDDKGNTLIVNNLNGLYDKDNDKLKKLINKSPEKLLMYHHDPQTYQKLKLIMEQYGDEKNPLYKYYEETGNYLTKYSKKDNGPVIKKIKYYGNKLNAHLDITDDYPNSRNKVVKLSLKPYRFDVYLDNGVYKFVTVKNLDVIKKENYYEVNSKCYEEAKKLKKISNQAEFIASFYNNDLIKINGELYRVIGVNNDLLNRIEVNMIDITYREYLENMNDKRPPRIIKTIASKTQSIKKYSTDILGNLYEVKSKKHPQIIKKG

SEQ ID NO: 3 - protein, 984 aa, Campylobacter jejuni
MARILAFDIGISSIGWAFSENDELKDCGVRIFTKVENPKTGESLALPRRLARSARKRLARRKARLNHLKHLIANEFKLNYEDYQSFDESLAKAYKGSLISPYELRFRALNELLSKQDFARVILHIAKRRGYDDIKNSDDKEKGAILKAIKQNEEKLANYQSVGEYLYKEYFQKFKENSKEFTNVRNKKESYERCIAQSFLKDELKLIFKKQREFGFSFSKKFEEEVLSVAFYKRALKDFSHLVGNCSFFTDEKRAPKNSPLAFMFVALTRIINLLNNLKNTEGILYTKDDLNALLNEVLKNGTLTYKQTKKLLGLSDDYEFKGEKGTYFIEFKKYKEFIKALGEHNLSQDDLNEIAKDITLIKDEIKLKKALAKYDLNQNQIDSLSKLEFKDHLNISFKALKLVTPLMLEGKKYDEACNELNLKVAINEDKKDFLPAFNETYYKDEVTNPVVLRAIKEYRKVLNALLKKYGKVHKINIELAREVGKNHSQRAKIEKEQNENYKAKKDAELECEKLGLKINSKNILKLRLFKEQKEFCAYSGEKIKISDLQDEKMLEIDHIYPYSRSFDDSYMNKVLVFTKQNQEKLNQTPFEAFGNDSAKWQKIEVLAKNLPTKKQKRILDKNYKDKEQKNFKDRNLNDTRYIARLVLNYTKDYLDFLPLSDDENTKLNDTQKGSKVHVEAKSGMLTSALRHTWGFSAKDRNNHLHHAIDAVIIAYANNSIVKAFSDFKKEQESNSAELYAKKISELDYKNKRKFFEPFSGFRQKVLDKIDEIFVSKPERKKPSGALHEETFRKEEEFYQSYGGKEGVLKALELGKIRKVNGKIVKNGDMFRVDIFKHKKTNKFYAVPIYTMDFALKVLPNKAVARSKKGEIKDWILMDENYEFCFSLYKDSLILIQTKDMQEPEFVYYNAFTSSTVSLIVSKHDNKFETLSKNQKILFKNANEKEVIAKSIGIQNLKVFEKYIVSALGEVTKAEFRQREDFKK

SEQ ID NO: 4 - protein, 1121 aa, Stretococcus thermophilus
MSDLVLGLDIGIGSVGVGILNKVTGEIIHKNSRIFPAAQAENNLVRRTNRQGRRLARRKKHRRVRLNRLFEESGLITDFTKISINLNPYQLRVKGLTDELSNEELFIALKNMVKHRGISYLDDASDDGNSSVGDYAQIVKENSKQLETKTPGQIQLERYQTYGQLRGDFTVEKDGKKHRLINVFPTSAYRSEALRILQTQQEFNPQITDEFINRYLEILTGKRKYYHGPGNEKSRTDYGRYRTSGETLDNIFGILIGKCTFYPDEFRAAKASYTAQEFNLLNDLNNLTVPTETKKLSKEQKNQIINYVKNEKAMGPAKLFKYIAKLLSCDVADIKGYRIDKSGKAEIHTFEAYRKMKTLETLDIEQMDRETLDKLAYVLTLNTEREGIQEALEHEFADGSFSQKQVDELVQFRKANSSIFGKGWHNFSVKLMMELIPELYETSEEQMTILTRLGKQKTTSSSNKTKYIDEKLLTEEIYNPVVAKSVRQAIKIVNAAIKEYGDFDNIVIEMARETNEDDEKKAIQKIQKANKDEKDAAMLKAANQYNGKAELPHSVFHGHKQLATKIRLWHQQGERCLYTGKTISIHDLINNSNQFEVDHILPLSITFDDSLANKVLVYATANQEKGQRTPYQALDSMDDAWSFRELKAFVRESKTLSNKKKEYLLTEEDISKFDVRKKFIERNLVDTRYASRVVLNALQEHFRAHKIDTKVSVVRGQFTSQLRRHWGIEKTRDTYHHHAVDALIIAASSQLNLWKKQKNTLVSYSEDQLLDIETGELISDDEYKESVFKAPYQHFVDTLKSKEFEDSILFSYQVDSKFNRKISDATIYATRQAKVGKDKADETYVLGKIKDIYTQDGYDAFMKIYKKDKSKFLMYRHDPQTFEKVIEPILENYPNKQINEKGKEVPCNPFLKYKEEHGYIRKYSKKGNGPEIKSLKYYDSKLGNHIDITPKDSNNKVVLQSVSPWRADVYFNKTTGKYEILGLKYADLQFEKGTGTYKISQEKYNDIKKKEGVDSDSEFKFTLYKNDLLLVKDTETKEQQLFRFLSRTMPKQKHYVELKPYDKQKFEGGEALIKVLGNVANSGQCKKGLGKSNISIYKVRTDVLGNQHIIKNEGDKPKLDF

SEQ ID NO: 5 - protein, 1037 aa, Parvibaculum lavamentivorans
MERIFGFDIGTTSIGFSVIDYSSTQSAGNIQRLGVRIFPEARDPDGTPLNQQRRQKRMMRRQLRRRRIRRKALNETLHEAGFLPAYGSADWPVVMADEPYELRRRGLEEGLSAYEFGRAIYHLAQHRHFKGRELEESDTPDPDVDDEKEAANERAATLKALKNEQTTLGAWLARRPPSDRKRGIHAHRNVVAEEFERLWEVQSKFHPALKSEEMRARISDTIFAQRPVFWRKNTLGECRFMPGEPLCPKGSWLSQQRRMLEKLNNLAIAGGNARPLDAEERDAILSKLQQQASMSWPGVRSALKALYKQRGEPGAEKSLKFNLELGGESKLLGNALEAKLADMFGPDWPAHPRKQEIRHAVHERLWAADYGETPDKKRVIILSEKDRKAHREAAANSFVADFGITGEQAAQLQALKLPTGWEPYSIPALNLFLAELEKGERFGALVNGPDWEGWRRTNFPHRNQPTGEILDKLPSPASKEERERISQLRNPTVVRTQNELRKVVNNLIGLYGKPDRIRIEVGRDVGKSKREREEIQSGIRRNEKQRKKATEDLIKNGIANPSRDDVEKWILWKEGQERCPYTGDQIGFNALFREGRYEVEHIWPRSRSFDNSPRNKTLCRKDVNIEKGNRMPFEAFGHDEDRWSAIQIRLQGMVSAKGGTGMSPGKVKRFLAKTMPEDFAARQLNDTRYAAKQILAQLKRLWPDMGPEAPVKVEAVTGQVTAQLRKLWTLNNILADDGEKTRADHRHHAIDALTVACTHPGMTNKLSRYWQLRDDPRAEKPALTPPWDTIRADAEKAVSEIVVSHRVRKKVSGPLHKETTYGDTGTDIKTKSGTYRQFVTRKKIESLSKGELDEIRDPRIKEIVAAHVAGRGGDPKKAFPPYPCVSPGGPEIRKVRLTSKQQLNLMAQTGNGYADLGSNHHIAIYRLPDGKADFEIVSLFDASRRLAQRNPIVQRTRADGASFVMSLAAGEAIMIPEGSKKGIWIVQGVWASGQVVLERDTDADHSTTTRPMPNPILKDDAKKVSIDPIGRVRPSND

SEQ ID NO: 6 - protein, 1084 aa, Corynebacter diphtheria
MKYHVGIDVGTFSVGLAAIEVDDAGMPIKTLSLVSHIHDSGLDPDEIKSAVTRLASSGIARRTRRLYRRKRRRLQQLDKFIQRQGWPVIELEDYSDPLYPWKVRAELAASYIADEKERGEKLSVALRHIARHRGWRNPYAKVSSLYLPDGPSDAFKAIREEIKRASGQPVPETATVGQMVTLCELGTLKLRGEGGVLSARLQQSDYAREIQEICRMQEIGQELYRKIIDVVFAAESPKGSASSRVGKDPLQPGKNRALKASDAFQRYRIAALIGNLRVRVDGEKRILSVEEKNLVFDHLVNLTPKKEPEWVTIAEILGIDRGQLIGTATMTDDGERAGARPPTHDTNRSIVNSRIAPLVDWWKTASALEQHAMVKALSNAEVDDFDSPEGAKVQAFFADLDDDVHAKLDSLHLPVGRAAYSEDTLVRLTRRMLSDGVDLYTARLQEFGIEPSWTPPTPRIGEPVGNPAVDRVLKTVSRWLESATKTWGAPERVIIEHVREGFVTEKRAREMDGDMRRRAARNAKLFQEMQEKLNVQGKPSRADLWRYQSVQRQNCQCAYCGSPITFSNSEMDHIVPRAGQGSTNTRENLVAVCHRCNQSKGNTPFAIWAKNTSIEGVSVKEAVERTRHWVTDTGMRSTDFKKFTKAVVERFQRATMDEEIDARSMESVAWMANELRSRVAQHFASHGTTVRVYRGSLTAEARRASGISGKLKFFDGVGKSRLDRRHHAIDAAVIAFTSDYVAETLAVRSNLKQSQAHRQEAPQWREFTGKDAEHRAAWRVWCQKMEKLSALLTEDLRDDRVVVMSNVRLRLGNGSAHKETIGKLSKVKLSSQLSVSDIDKASSEALWCALTREPGFDPKEGLPANPERHIRVNGTHVYAGDNIGLFPVSAGSIALRGGYAELGSSFHHARVYKITSGKKPAFAMLRVYTIDLLPYRNQDLFSVELKPQTMSMRQAEKKLRDALATGNAEYLGWLVVDDELVVDTSKIATDQVKAVEAELGTIRRWRVDGFFSPSKLRLRPLQMSKEGIKKESAPELSKIIDRPGWLPAVNKLFSDGNVTVVRRDSLGRVRLESTAHLPVTWKVQ

SEQ ID NO: 7 - protein, 1130 aa, Streptococcus pasteurianus
MTNGKILGLDIGIASVGVGIIEAKTGKVVHANSRLFSAANAENNAERRGFRGSRRLNRRKKHRVKRVRDLFEKYGIVTDFRNLNLNPYELRVKGLTEQLKNEELFAALRTISKRRGISYLDDAEDDSTGSTDYAKSIDENRRLLKNKTPGQIQLERLEKYGQLRGNFTVYDENGEAHRLINVFSTSDYEKEARKILETQADYNKKITAEFIDDYVEILTQKRKYYHGPGNEKSRTDYGRFRTDGTTLENIFGILIGKCNFYPDEYRASKASYTAQEYNFLNDLNNLKVSTETGKLSTEQKESLVEFAKNTATLGPAKLLKEIAKILDCKVDEIKGYREDDKGKPDLHTFEPYRKLKFNLESINIDDLSREVIDKLADILTLNTEREGIEDAIKRNLPNQFTEEQISEIIKVRKSQSTAFNKGWHSFSAKLMNELIPELYATSDEQMTILTRLEKFKVNKKSSKNTKTIDEKEVTDEIYNPVVAKSVRQTIKIINAAVKKYGDFDKIVIEMPRDKNADDEKKFIDKRNKENKKEKDDALKRAAYLYNSSDKLPDEVFHGNKQLETKIRLWYQQGERCLYSGKPISIQELVHNSNNFEIDHILPLSLSFDDSLANKVLVYAWTNQEKGQKTPYQVIDSMDAAWSFREMKDYVLKQKGLGKKKRDYLLTTENIDKIEVKKKFIERNLVDTRYASRVVLNSLQSALRELGKDTKVSVVRGQFTSQLRRKWKIDKSRETYHHHAVDALIIAASSQLKLWEKQDNPMFVDYGKNQVVDKQTGEILSVSDDEYKELVFQPPYQGFVNTISSKGFEDEILFSYQVDSKYNRKVSDATIYSTRKAKIGKDKKEETYVLGKIKDIYSQNGFDTFIKKYNKDKTQFLMYQKDSLTWENVIEVILRDYPTTKKSEDGKNDVKCNPFEEYRRENGLICKYSKKGKGTPIKSLKYYDKKLGNCIDITPEESRNKVILQSINPWRADVYFNPETLKYELMGLKYSDLSFEKGTGNYHISQEKYDAIKEKEGIGKKSEFKFTLYRNDLILIKDIASGEQEIYRFLSRTMPNVNHYVELKPYDKEKFDNVQELVEALGEADKVGRCIKGLNKPNISIYKVRTDVLGNKYFVKKKGDKPKLDFKNNKK

SEQ ID NO: 8 - protein, 1080 aa, Neisseria cinereal
MAAFKPNPMNYILGLDIGIASVGWAIVEIDEEENPIRLIDLGVRVFERAEVPKTGDSLAAARRLARSVRRLTRRRAHRLLRARRLLKREGVLQAADFDENGLIKSLPNTPWQLRAAALDRKLTPLEWSAVLLHLIKHRGYLSQRKNEGETADKELGALLKGVADNTHALQTGDFRTPAELALNKFEKESGHIRNQRGDYSHTFNRKDLQAELNLLFEKQKEFGNPHVSDGLKEGIETLLMTQRPALSGDAVQKMLGHCTFEPTEPKAAKNTYTAERFVWLTKLNNLRILEQGSERPLTDTERATLMDEPYRKSKLTYAQARKLLDLDDTAFFKGLRYGKDNAEASTLMEMKAYHAISRALEKEGLKDKKSPLNLSPELQDEIGTAFSLFKTDEDITGRLKDRVQPEILEALLKHISFDKFVQISLKALRRIVPLMEQGNRYDEACTEIYGDHYGKKNTEEKIYLPPIPADEIRNPVVLRALSQARKVINGVVRRYGSPARIHIETAREVGKSFKDRKEIEKRQEENRKDREKSAAKFREYFPNFVGEPKSKDILKLRLYEQQHGKCLYSGKEINLGRLNEKGYVEIDHALPFSRTWDDSFNNKVLALGSENQNKGNQTPYEYFNGKDNSREWQEFKARVETSRFPRSKKQRILLQKFDEDGFKERNLNDTRYINRFLCQFVADHMLLTGKGKRRVFASNGQITNLLRGFWGLRKVRAENDRHHALDAVVVACSTIAMQQKITRFVRYKEMNAFDGKTIDKETGEVLHQKAHFPQPWEFFAQEVMIRVFGKPDGKPEFEEADTPEKLRTLLAEKLSSRPEAVHKYVTPLFISRAPNRKMSGQGHMVKSAKRLDEGISVLRVPLTQLKLKDLEKMVNREREPKLYEALKARLEAHKDDPAKAFAEPFYKYDKAGNRTQQVKAVRVEQVQKTGVWVHNHNGIADNATIVRVDVFEKGGKYYLVPIYSWQVAKGILPDRAVVQGKDEEDWTVMDDSFEFKFVLYANDLIKLTAKKNEFLGYFVSLNRATGAIDIRTHDTDSTKGKNGIFQSVGVKTALSFQKYQIDELGKEIRPCRLKKRPPVR

SEQ ID NO: 9 - protein, 1003 aa, Campylobacter lari
MRILGFDIGINSIGWAFVENDELKDCGVRIFTKAENPKNKESLALPRRNARSSRRRLKRRKARLIAIKRILAKELKLNYKDYVAADGELPKAYEGSLASVYELRYKALTQNLETKDLARVILHIAKHRGYMNKNEKKSNDAKKGKILSALKNNALKLENYQSVGEYFYKEFFQKYKKNTKNFIKIRNTKDNYNNCVLSSDLEKELKLILEKQKEFGYNYSEDFINEILKVAFFQRPLKDFSHLVGACTFFEEEKRACKNSYSAWEFVALTKIINEIKSLEKISGEIVPTQTINEVLNLILDKGSITYKKFRSCINLHESISFKSLKYDKENAENAKLIDFRKLVEFKKALGVHSLSRQELDQISTHITLIKDNVKLKTVLEKYNLSNEQINNLLEIEFNDYINLSFKALGMILPLMREGKRYDEACEIANLKPKTVDEKKDFLPAFCDSIFAHELSNPVVNRAISEYRKVLNALLKKYGKVHKIHLELARDVGLSKKAREKIEKEQKENQAVNAWALKECENIGLKASAKNILKLKLWKEQKEICIYSGNKISIEHLKDEKALEVDHIYPYSRSFDDSFINKVLVFTKENQEKLNKTPFEAFGKNIEKWSKIQTLAQNLPYKKKNKILDENFKDKQQEDFISRNLNDTRYIATLIAKYTKEYLNFLLLSENENANLKSGEKGSKIHVQTISGMLTSVLRHTWGFDKKDRNNHLHHALDAIIVAYSTNSIIKAFSDFRKNQELLKARFYAKELTSDNYKHQVKFFEPFKSFREKILSKIDEIFVSKPPRKRARRALHKDTFHSENKIIDKCSYNSKEGLQIALSCGRVRKIGTKYVENDTIVRVDIFKKQNKFYAIPIYAMDFALGILPNKIVITGKDKNNNPKQWQTIDESYEFCFSLYKNDLILLQKKNMQEPEFAYYNDFSISTSSICVEKHDNKFENLTSNQKLLFSNAKEGSVKVESLGIQNLKVFEKYIITPLGDKIKADFQPRENISLKTSKKYGLR

SEQ ID NO: 10 - protein, 1145 aa, Alicyclobacillus macrosporangiidus
MVAVKSIKVKLMLGHLPEIREGLWHLHEAVNLGVRYYTEWLALLRQGNLYRRGKDGAQECYMTAEQCRQELLVRLRDRQKRNGHTGDPGTDEELLGVARRLYELLVPQSVGKKGQAQMLASGFLSPLADPKSEGGKGTSKSGRKPAWMGMKEAGDSRWVEAKARYEANKAKDPTKQVIASLEMYGLRPLFDVFTETYKTIRWMPLGKHQGVRAWDRDMFQQSLERLMSWESWNERVGAEFARLVDRRDRFREKHFTGQEHLVALAQRLEQEMKEASPGFESKSSQAHRITKRALRGADGIIDDWLKLSEGEPVDRFDEILRKRQAQNPRRFGSHDLFLKLAEPVFQPLWREDPSFLSRWASYNEVLNKLEDAKQFATFTLPSPCSNPVWARFENAEGTNIFKYDFLFDHFGKGRHGVRFQRMIVMRDGVPTEVEGIVVPIAPSRQLDALAPNDAASPIDVFVGDPAAPGAFRGQFGGAKIQYRRSALVRKGRREEKAYLCGFRLPSQRRTGTPADDAGEVFLNLSLRVESQSEQAGRRNPPYAAVFHISDQTRRVIVRYGEIERYLAEHPDTGIPGSRGLTSGLRVMSVDLGLRTSAAISVFRVAHRDELTPDAHGRQPFFFPIHGMDHLVALHERSHLIRLPGETESKKVRSIREQRLDRLNRLRSQMASLRLLVRTGVLDEQKRDRNWERLQSSMERGGERMPSDWWDLFQAQVRYLAQHRDASGEAWGRMVQAAVRTLWRQLAKQVRDWRKEVRRNADKVKIRGIARDVPGGHSLAQLDYLERQYRFLRSWSAFSVQAGQVVRAERDSRFAVALREHIDNGKKDRLKKLADRILMEALGYVYVTDGRRAGQWQAVYPPCQLVLLEELSEYRFSNDRPPSENSQLMVWSHRGVLEELIHQAQVHDVLVGTIPAAFSSRFDARTGAPGIRCRRVPSIPLKDAPSIPIWLSHYLKQTERDAAALRPGELIPTGDGEFLVTPAGRGASGVRVVHADINAAHNLQRRLWENFDLSDIRVRCDRREGKDGTVVLIPRLTNQRVKERYSGVIFTSEDGVSFTVGDAKTRRRSSASQGEGDDLSDEEQELLAEADDARERSVVLFRDPSGFVNGGRWTAQRAFWGMVHNRIETLLAERFSVSGAAEKVRG

SEQ ID NO: 11 - protein, 1108 aa, Bacillus hisashii
MATRSFILKIEPNEEVKKGLWKTHEVLNHGIAYYMNILKLIRQEAIYEHHEQDPKNPKKVSKAEIQAELWDFVLKMQKCNSFTHEVDKDEVFNILRELYEELVPSSVEKKGEANQLSNKFLYPLVDPNSQSGKGTASSGRKPRWYNLKIAGDPSWEEEKKKWEEDKKKDPLAKILGKLAEYGLIPLFIPYTDSNEPIVKEIKWMEKSRNQSVRRLDKDMFIQALERFLSWESWNLKVKEEYEKVEKEYKTLEERIKEDIQALKALEQYEKERQEQLLRDTLNTNEYRLSKRGLRGWREIIQKWLKMDENEPSEKYLEVFKDYQRKHPREAGDYSVYEFLSKKENHFIWRNHPEYPYLYATFCEIDKKKKDAKQQATFTLADPINHPLWVRFEERSGSNLNKYRILTEQLHTEKLKKKLTVQLDRLIYPTESGGWEEKGKVDIVLLPSRQFYNQIFLDIEEKGKHAFTYKDESIKFPLKGTLGGARVQFDRDHLRRYPHKVESGNVGRIYFNMTVNIEPTESPVSKSLKIHRDDFPKVVNFKPKELTEWIKDSKGKKLKSGIESLEIGLRVMSIDLGQRQAAAASIFEVVDQKPDIEGKLFFPIKGTELYAVHRASFNIKLPGETLVKSREVLRKAREDNLKLMNQKLNFLRNVLHFQQFEDITEREKRVTKWISRQENSDVPLVYQDELIQIRELMYKPYKDWVAFLKQLHKRLEVEIGKEVKHWRKSLSDGRKGLYGISLKNIDEIDRTRKFLLRWSLRPTEPGEVRRLEPGQRFAIDQLNHLNALKEDRLKKMANTIIMHALGYCYDVRKKKWQAKNPACQIILFEDLSNYNPYEERSRFENSKLMKWSRREIPRQVALQGEIYGLQVGEVGAQFSSRFHAKTGSPGIRCSVVTKEKLQDNRFFKNLQREGRLTLDKIAVLKEGDLYPDKGGEKFISLSKDRKCVTTHADINAAQNLQKRFWTRTHGFYKVYCKAYQVDGQTVYIPESKDQKQKIIEEFGEGYFILKDGVYEWVNAGKLKIKKGSSKQSSSELVDSDILKDSFDLASELKGEKLMLYRDPSGNVFPSDKWMAAGVFFGKLERILISKLTNQYSISTIEDDSSKQSM

SEQ ID NO: 12 - protein, 1364 aa, Candidatus Lindowbacteria bacterium
MPRDDLDLLTNLNSTAKGIRERGKTKEGTDKKKSGRKSSWPMDKAAWETAKTSDSSAHFLEKLKQHPDLKDAFGNLSSGGSKKLEYYKKLAGSAPWKESQSVILEKAARWKEAKQEREEKEQDSSEHGSKAAYRRLFDAGCLPMPEFAKYIDENQIEFGDLKLSDCGAEWKRGMWNQAGQRVRSHMGWQRRREKENAVYSLRKELFEKGGAIRRKKSEELTPEDILPGKAAPDQNDWQERPAYGNQMWFIGLRSYEENEMAKYAEEAGMGSRSAPRIRRGTIKGWSKLRERWLQILKRNPQATRDDLIGELNALRSQDPRAYGDARLFDWLSKTDQRFLWDGFDADGKILCGRDDRDCVSAFVAYNEEFADEPSSITLTETDERLHPVWPFFGESSAVPYEIEYDLETACPTAIRLPLLVGKENGGYAERQGTRLPLAEYADLASSFQLPTPVRLDVLVEIREVTRAGRKVTCPFSYFKQNGVWYVREGEIPSGESIQIKQTDRKIENGKIFISSKLRMAYRDDLMVSPATGDFGSIKILWERIELASHVDQKKLPETAPARSRVFVSFSCNVVERAPRKQLTRKPDAVVVTIPSGVDQGLVVVSTDVRTGKSKSSSAPPLPPGSRLWPADAVHGDPPLRILSVDLGHRHSAYAVWELGLQQKSWRAGVLKGSTQTPVYADCTGTGLLCLPGDGEDTPAEEESLRLRSRQIRRRLNLQNSILRVSRLLSLDKFEKTIFEQSDVRDRPNKKGLRIRRRCRTEKTPLSEAEVRKNCDKAAEILIRWADTDAMAKSLAATGNADISFWKYMAVKNPPLSAVVDVAPSTIVPDDGPDRETLKKKRQEEEEKFASSIYENRVKLAGALCSGYDADHRRPATGGLWHDLDRTLIREISYGDRGQKGNPRKLNNEGILRLLRRPPRARPDWREFHRTLNDANRIPKGRTLRGGLSMGRLNFLKEVGDFVKKWSCRPRWPGDRRHIPPGQLFDRQDAEHLEHLRDDRIKRLAHLIVAQALGFEPDIRRGLWKYVDGSTGEILWQHPETRRFFAEGAAGELREVSRPAEIDDDAAARPHTVSAPAHIVVFENLIRYRFQSDRPKTENAGLMQWAHRQIVHFTKQVASLYGLKVAMVYAAFSSKFCSRCGSPGARVSRFDPAWRNQEWFKRRTSNPRSKVDHSLKRASEDPTADETRPWVLIEGGKEFVCANAKCSAHDEPLNADENAAANIGLRFLRGVEDFRTKVNPAGALKGKLRFETGIHSFRPPVSGSPFWSPMAEPAQKKKIGAAAPGADVDEAGDADESGVVVLFRDPSGAFRNKQYWYEGKIFWSNVMMAVEAKIAGASVGAKPVAASWGQAQPQSGPGLAKPGGD

SEQ ID NO: 13 - protein, 1364 aa, Other
MNRIYQGRVTKVEVPDGKDEKGNIKWKKLENWSDILWQHHMLFQDAVNYYTLALAAISGSAVGSDEKSIILREWAVQVQNIWEKAKKKATVFEGPQKRLTSILGLEQNASFDIAAKHILRTSEAKPEQRASALIRLLEEIDKKNHNVVCGERLPFFCPRNIQSKRSPTSKAVSSVQEQKRQEEVRRFHNMQPEEVVKNAVTLDISLFKSSPKIVFLEDPKKARAELLKQFDNACKKHKELVGIKKAFTESIDKHGSSLKVPAPGSKPSGLYPSAIVFKYFPVDITKTVFLKATEKLAMGKDREVTNDPIADARVNDKPHFDYFTNIALIREKEKNRAAWFEFDLAAFIEAIMSPHRFYQDTQKRKEAARKLEEKIKAIEGKGGQFKESDSEDDDVDSLPGFEGDTRIDLLRKLVTDTLGWLGESETPDNNEGKKTEYSISERTLRIFPDIQKQWSELAEKGETTEGKLLEVLKHEQTEHQSDFGSATLYQHLAKPEFHPIWLKSGTEEWHAENPLKAWLNYKELQYELTDKKRPIHFTPAHPVYSPRYFDFPKKSETEEKEVSKNTHSLTTSLASEHIKNSLQFTAGLIRKTNVGKKAIKARFSYSAPRLRRDCLRSENNENLYKAPWLQPMMRALGIDEEKADRQNFANTRITLMAKGLDDIQLGFPVEANSQELQKEVSNGISWKGQFNWGGIASLSALRWPHEKKPKNPPEQPWWGIDSFSCLAVDLGQRYAGAFARLDVSTIEKKGKSRFIGEACDKKWYAKVSRMGLLRLPGEDVKVWRDASKIDKENGFAFRKELFGEKGRSATPLEAEETAELIKLFGANEKDVMPDNWSKELSFPEQNDKLLIVARRAQAAVSRLHRWAWFFDEAKRSDDAIREILESDDTDLKQKVNKNEIEKVKETIISLLKVKQELLPTLLTRLANRVLPLRGRSWEWKKHHQKNDGFILDQTGKAMPNVLIRGQRGLSMDRIEQITELRKRFQALNQSLRRQIGKKAPAKRDDSIPDCCPDLLEKLDHMKEQRVNQTAHMILAEALGLKLAEPPKDKKELNETCDMHGAYAKVDNPVSFIVIEDLSRYRSSQGRSPRENSRLMKWCHRAVRDKLKEMCEVFFPLCERRKAGSAWVSLPPLLETPAAYSSRFCSRSGVAGFRAVEVIPGFELKYPWSWLKDKKDKAGNLAKEALNIRTVSEQLKAFNQDKPEKPRTLLVPIAGGPIFVPISEVGLSSFGLKPQVVQADINAAINLGLRAISDPRIWEIHPRLRTEKRDGRLFAREKRKYGEEKVEVQPSKNEKAKKVKDDRKPNYFADFSGKVDWGFGNIKNESGLTLVSGKALWWTINQLQWERCFDINKRHIEDWSNKQKQ

SEQ ID NO: 14 - protein, 1413 aa, Other
MNRIYQGRVTKVEKLKNGKSPDDREELKDWQTALWRHHELFQDAVSYYTLALAAMAEGLPDKHPINVLRKRMEEAWEEFPRKTVTPAKNLRDSVRPWLGLSESASFGDALKKILPPAPENKEVRALAVALLAEKARTLKPQKTSASYWGRFCDDLKKKPNWDYSEEELARKTGSGDWVAGLWSEDALNKIDELAKSLKLSSLVKCVPDGQINPEGARNLVKEALDHLEGVSNGTKKEKNDPGPAKKTNNWLRQHASDVRNFIHKNKNQFSSLPNGRLITERARGGGININKTYAGVLFKAFPCPFTFDYVRAAVPEPKVKKVDQEKKSEQSATWTELEKRILRIGDDPIELARKNNKPIFKAFTALEKWSDQNSKSCWSDFDKCAFEEALKTLNQFNQKTEEREKRRSEAEAELKYMMDENPEWKPKKETEGDDVREVPILKGDPRYEKLVKLFGDLDEEGSEHATGKIYGPSRASLRGFGKLRNEWVDLFTKANDNPREQDLQKAVTGFQREHKLDMGYTAFFLKLCERDYWDIWRDDTEVEVKKIREKRWVKSVVYAAADTRELAEELERLQEPVRYTPAEPQFSRRLFMFSDIKGKQGAKHIREGLVEVSLAVKDQSGKYGTCRVRLHYSAPRLIRDHLSDGSSSMWLQPMMAALGLSSDARGCFTRDSKGNVKEPAVALMSDFVGRKRELRMLLNFPVDLDISKLEENIGKKARWEKQMNTAYEKNKLKQRFHLIWPGMELKETQEPGQFWWDNPTIQKEGMYCLAIDLSQRRAADYALLHAGVNRDSKTFVELGQAGGQSWFTKLCAAGSLRLPGEDTEVIREGKRQIELSGKKGRNATQSEYDQAIALAKQLLHNENSAELESAARDWLGDNAKRFSFPEQNDKLIDLYYGALSRYKTWLRWSWRLTEQHKELWDKTLDEIRKVPYFASWGELAGNGTNEATVQQLQKLIADAAVDLRNFLEKALLHIAYRALPLRENTWRWIENGKDGKGKPLHLLVSDGQSPAEIPWLRGQRGLSIARIEQLENFRRAVLSLNRLLRHEIGTKPEFGSSTCGESLPDPCPDLTDKIVRLKEERVNQTAHLIIAQSLGVRLKGHSLFTEEREKADMHGEHEVIPGRSPVDFVVLEDLSRYTTDKSRSRSENSRLMKWCHRKINEKVKLLAEPFGIPVIEVFASYSSKFDARTGAPGFRAVEVTSEDRPFWRKTIEKQSVAREVFDCLDNLVGKGLNGIHLVLPQNGGPLFIAAVKEDQPLPAIRQADINAAVNIGLRAIAGPSCYHAHPKVRLIKGESGTDKGKWLPRKGKEANKRENAQFGNVDLDLEVKFNRLDIDSDVLKGDNTNLFHDPLNIACYGFATIQNLQHPFLAHASAVFSRQKGAVARLQWEVCRAINSRRLEAWQKKAEKAAVKR

SEQ ID NO: 15 - protein, 747 aa, Other
MATKSYRARILTDSRLAAALDRTHVVFVESLKQMINTYLRMQNGKFGPDHKKLAQIMLSRSNTFAHGVMDQITRDQPTSTLDEEWTDLARRIHKTTGPLFLQAERFATVKNRAIHTKSRGKVIPSPETLAVPAKFWHQVCDSASAYIRSNRELMQQWRKDRAAWLKDKNEWQQKHPEFMQFYNGPYQNFLKLCDDDRITSQLAAEQQPTASKNNRPRKTGKRFARWHLWYKWLSENPEIIEWRNKASASDFKTVTDDVRKQIITKYPQQNKYITRLLDWLEDNNPELKTLENLRRTYVKKFDSFKRPPTLTLPSPYRHPYWFTMELDQFYKKADFENGTIQLLLIDEDDDGNWFFNWMPASLKPDPRLVPSWRAETFETEGRFPPYLGGKIGKKLSRPAPTDAERKAGIAGAKLMIKNNRSELLFTVFEQDCPPRVKWAKTKNRKCPADNAFSSDGKTRKPLRILSIDLGIRHIGAFALTQGTRNDSAWQTESLKKGIINSPSIPPLRQVRRHDYDLKRKRRRHGKPVKGQRSNANLQAHRTNMAQDRFKKGASAIVSLAREHSADLILFENLHSLKFSAFDERWMNRQLRDMNRRHIVELVSEQAPEFGITVKDDINPWMTSRICSNCNLPGFRFSMKKKNPYREKLPREKCTDFGYPVWEPGGHLFRCPHCDHRVNADINAAANLANKFFGLGYWNNGLKYDAETKTFTVHTDKKTPPLIFKPRPQFDLWADSVKTRKQLGPDPF

SEQ ID NO: 16 - protein, 743 aa, Other
MSVRSFQARVECDKQTMEHLWRTHKVFNERLPEIIKILFKMKRGECGQNDKQKSLYKSISQSILEANAQNADYLLNSVSIKGWKPGTAKKYRNASFTWADDAAKLSSQGIHVYDKKQVLGDLPGMMSQMVCRQSVEAISGHIELTKKWEKEHNEWLKEKEKWESEDEHKKYLDLREKFEQFEQSIGGKITKRRGRWHLYLKWLSDNPDFAAWRGNKAVINPLSEKAQIRINKAKPNKKNSVERDEFFKANPEMKALDNLHGYYERNFVRRRKTKKNPDGFDHKPTFTLPHPTIHPRWFVFNKPKTNPEGYRKLILPKKAGDLGSLEMRLLTGEKNKGNYPDDWISVKFKADPRLSLIRPVKGRRVVRKGKEQGQTKETDSYEFFDKHLKKWRPAKLSGVKLIFPDKTPKAAYLYFTCDIPDEPLTETAKKIQWLETGDVTKKGKKRKKKVLPHGLVSCAVDLSMRRGTTGFATLCRYENGKIHILRSRNLWVGYKEGKGCHPYRWTEGPDLGHIAKHKREIRILRSKRGKPVKGEESHIDLQKHIDYMGEDRFKKAARTIVNFALNTENAASKNGFYPRADVLLLENLEGLIPDAEKERGINRALAGWNRRHLVERVIEMAKDAGFKRRVFEIPPYGTSQVCSKCGALGRRYSIIRENNRREIRFGYVEKLFACPNCGYCANADHNASVNLNRRFLIEDSFKSYYDWKRLSEKKQKEEIETIESKLMDKLCAMHKISRGSISK

SEQ ID NO: 17 - protein, 1119 aa, Other
MSFTISYPFKLIIKNKDEAKALLDTHQYMNEGVKYYLEKLLMFRQEKIFIGEDETGKRIYIEETEYKKQIEEFYLIKKTELGRNLTLTLDEFKTLMRELYICLVSSSMENKKGFPNAQQASLNIFSPLFDAESKGYILKEENNNISLIHKDYGKILLKRLRDNNLIPIFTKFTDIKKITAKLSPTALDRMIFAQAIEKLLSYESWCKLMIKERFDKEVKIKELENKCENKQERDKIFEILEKYEEERQKTFEQDSGFAKKGKFYITGRMLKGFDEIKEKWLKEKDRSEQNLINILNKYQTDNSKLVGDRNLFEFIIKLENQCLWNGDIDYLKIKRDINKNQIWLDRPEMPRFTMPDFKKHPLWYRYEDPSNSNFRNYKIEVVKDENYITIPLITERNNEYFEENYTFNLAKLKKLSENITFIPKSKNKEFEFIDSNDEEEDKKDQKKSKQYIKYCDTAKNTSYGKSGGIRLYFNRNELENYKDGKKMDSYTVFTLSIRDYKSLFAKEKLQPQIFNTVDNKITSLKIQKKFGNEEQTNFLSYFTQNQITKKDWMDEKTFQNVKELNEGIRVLSVDLGQRFFAAVSCFEIMSEIDNNKLFFNLNDQNHKIIRINDKNYYAKHIYSKTIKLSGEDDDLYKERKINKNYKLSYQERKNKIGIFTRQINKLNQLLKIIRNDEIDKEKFKELIETTKRYVKNTYNDGIIDWNNVDNKILSYENKEDVINLHKELDKKLEIDFKEFIRECRKPIFRSGGLSMQRIDFLEKLNKLKRKWVARTQKSAESIVLTPKFGYKLKEHINELKDNRVKQGVNYILMTALGYIKDNEIKNDSKKKQKEDWVKKNRACQIILMEKLTEYTFAEDRPREENSKLRMWSHRQIFNFLQQKASLWGILVGDVFAPYTSKCLSDNNAPGIRCHQVTKKDLIDNSWFLKIVVKDDAFCDLIEINKENVKNKSIKINDILPLRGGELFASIKDGKLHIVQADINASRNIAKRFLSQINPFRVVLKKDKDETFHLKNEPNYLKNYYSILNFVPTNEELTFFKVEENKDIKPTKRIKMDKHEKESTDEGDDYSKNQIALFRDDSGIFFDKSLWVDGKIFWSVVKNKMTKLLRERNNKKNGSK

SEQ ID NO: 18 - protein, 1447 aa, Other
MPLSRIYQGRTNSLIILTPTPQEPWDHKALARFDSPLWRHHALFQDAVNYYQLCLVALASSDGTRPLSKLHEQMKASWDEAKTDTEDSWRVRLARRLGIPAASLFEAALAKVLEGNEAPERARELAGELLLDKIEGDIQQAGRGYWPRFCDPKANPTYDYSATARASASGLTKLAAVIHAENVTEEALKQVAAEMDLSWTVKLQPDKNFVGAEARARLLEAAHHFIKVAESPPTKLAEVLARFPDGLALWQALPEKIAALPEETQVPRNRKASPDLTFATLLFQHFPSLFTAAVLGLSVGKPKSVKAPKVVEKVSARRKANAVTQAVVIEEPEIDFAELGDDPIKLARGERGFVFPAFTSLSFWAVPGPHVPVWKEFDIAAFKEALKTVNQFKLKTSERNALLAEAQRRLDYMDEKTHDWKTGDSDEPGHIPPRLKSDPNFTLIQALTQDEGVSNKATGDQHIPKGVYTGGLRGFYAIKKDWCELWERKADKSQGTPTEEELISIVTDYQRDHVYDVGDVGLFRALCEPRFWPLWQPLTDEQEAERIKAGRAKDMISAYRVWLELQEDVVRLAQPIRFTPAHAENSRRLFMFSDISGSHGAEFGSDGKSLEVSIAYDVDGKLQPVRAKLEFSAPRAARDELEGLSGGSESMRWFQPMMKALDCPEVEMPALEKCAVSLMPDVVKKGGGKWVRLLLNFPATLEPEGLIRHIGKQAMWYKQFNGTYKPRTQQLDTGLHLYWPGLEKAPEAEDAAAWWNREEIRAKGFSVLSVDLGQRDAGAWALLESRSDKAFSRNRQPFIELGEAGGKLWSTALLGLGMLRLPGEDARTGALDDQGKRAVEFHGKAGRNALEAEWQEAREMALLFGGEEAKSRLGPGFDHLSHSKQNEELLRILSRAQSRLARFHRWSCRIHEKPEATGDDVIDYGQVDELLTKTAEAMLENLKALYTNAGGILDSKSKQPLTLVGLRKKLEAQKVEPEKIAAVLKPHAEIIFQRLGTLIPELKQHLRVSLERLANRELPLRHREWVWNEAFEKLEQGNFKKEENPKWIRGQRGLSMARIEQIENLRKRFMSLRRQMSLIPGEQVKQGVEDKGQRQPEPCEDILNKLDRMKQQRVNQTAHLILAQALGLRLRPHLANDAEREEKDIHGEYELIPGRKPVDFIVMEDLSRYLSSQGRAPSENGRLMKWCHRAVLAKLKQMCEPFGIPVLEVPAAYSSRFCALTGVPGFRAVEVHDGNAEDFRWKRLIKKAEKDKSSKDAEAAAMLFDQLHDLNIEAREARKQDKKLPLRTLFAPVAGGPLFIPMVGGGPRQADMNAAINLGLRAIASPTCLRARPKIRAELKDGKHQAMLGNKLEKAAALTLEPPKEPTKELAAQKRTNFFLDEKFVGKFDTAHVTTSGKKLRLSGGMSLWKAIKDGAWQRVKKINDARIAKWKNNPPPEPDPDDEIQF

SEQ ID NO: 19 - protein, 1147 aa, Alicyclobacillus kakegawensis
MAVKSIKVKLRLSECPDILAGMWQLHRATNAGVRYYTEWVSLMRQEILYSRGPDGGQQCYMTAEDCQRELLRRLRNRQLHNGRQDQPGTDADLLAISRRLYEILVLQSIGKRGDAQQIASSFLSPLVDPNSKGGRGEAKSGRKPAWQKMRDQGDPRWVAAREKYEQRKAVDPSKEILNSLDALGLRPLFAVFTETYRSGVDWKPLGKSQGVRTWDRDMFQQALERLMSWESWNRRVGEEYARLFQQKMKFEQEHFAEQSHLVKLARALEADMRAASQGFEAKRGTAHQITRRALRGADRVFEIWKSIPEEALFSQYDEVIRQVQAEKRRDFGSHDLFAKLAEPKYQPLWRADETFLTRYALYNGVLRDLEKARQFATFTLPDACVNPIWTRFESSQGSNLHKYEFLFDHLGPGRHAVRFQRLLVVESEGAKERDSVVVPVAPSGQLDKLVLREEEKSSVALHLHDTARPDGFMAEWAGAKLQYERSTLARKARRDKQGMRSWRRQPSMLMSAAQMLEDAKQAGDVYLNISVRVKSPSEVRGQRRPPYAALFRIDDKQRRVTVNYNKLSAYLEEHPDKQIPGAPGLLSGLRVMSVDLGLRTSASISVFRVAKKEEVEALGDGRPPHYYPIHGTDDLVAVHERSHLIQMPGETETKQLRKLREERQAVLRPLFAQLALLRLLVRCGAADERIRTRSWQRLTKQGREFTKRLTPSWREALELELTRLEAYCGRVPDDEWSRIVDRTVIALWRRMGKQVRDWRKQVKSGAKVKVKGYQLDVVGGNSLAQIDYLEQQYKFLRRWSFFARASGLVVRADRESHFAVALRQHIENAKRDRLKKLADRILMEALGYVYEASGPREGQWTAQHPPCQLIILEELSAYRFSDDRPPSENSKLMAWGHRGILEELVNQAQVHDVLVGTVYAAFSSRFDARTGAPGVRCRRVPARFVGATVDDSLPLWLTEFLDKHRLDKNLLRPDDVIPTGEGEFLVSPCGEEAARVRQVHADINAAQNLQRRLWQNFDITELRLRCDVKMGGEGTVLVPRVNNARAKQLFGKKVLVSQDGVTFFERSQTGGKPHSEKQTDLTDKELELIAEADEARAKSVVLFRDPSGHIGKGHWIRQREFWSLVKQRIESHTAERIRVRGVGSSLD

SEQ ID NO: 20 - protein, 1112 aa, Bacillus sp.
MAIRSIKLKMKTNSGTDSIYLRKALWRTHQLINEGIAYYMNLLTLYRQEAIGDKTKEAYQAELINIIRNQQRNNGSSEEHGSDQEILALLRQLYELIIPSSIGESGDANQLGNKFLYPLVDPNSQSGKGTSNAGRKPRWKRLKEEGNPDWELEKKKDEERKAKDPTVKIFDNLNKYGLLPLFPLFTNIQKDIEWLPLGKRQSVRKWDKDMFIQAIERLLSWESWNRRVADEYKQLKEKTESYYKEHLTGGEEWIEKIRKFEKERNMELEKNAFAPNDGYFITSRQIRGWDRVYEKWSKLPESASPEELWKVVAEQQNKMSEGFGDPKVFSFLANRENRDIWRGHSERIYHIAAYNGLQKKLSRTKEQATFTLPDAIEHPLWIRYESPGGTNLNLFKLEEKQKKNYYVTLSKIIWPSEEKWIEKENIEIPLAPSIQFNRQIKLKQHVKGKQEISFSDYSSRISLDGVLGGSRIQFNRKYIKNHKELLGEGDIGPVFFNLVVDVAPLQETRNGRLQSPIGKALKVISSDFSKVIDYKPKELMDWMNTGSASNSFGVASLLEGMRVMSIDMGQRTSASVSIFEVVKELPKDQEQKLFYSINDTELFAIHKRSFLLNLPGEVVTKNNKQQRQERRKKRQFVRSQIRMLANVLRLETKKTPDERKKAIHKLMEIVQSYDSWTASQKEVWEKELNLLTNMAAFNDEIWKESLVELHHRIEPYVGQIVSKWRKGLSEGRKNLAGISMWNIDELEDTRRLLISWSKRSRTPGEANRIETDEPFGSSLLQHIQNVKDDRLKQMANLIIMTALGFKYDKEEKDRYKRWKETYPACQIILFENLNRYLFNLDRSRRENSRLMKWAHRSIPRTVSMQGEMFGLQVGDVRSEYSSRFHAKTGAPGIRCHALTEEDLKAGSNTLKRLIEDGFINESELAYLKKGDIIPSQGGELFVTLSKRYKKDSDNNELTVIHADINAAQNLQKRFWQQNSEVYRVPCQLARMGEDKLYIPKSQTETIKKYFGKGSFVKNNTEQEVYKWEKSEKMKIKTDTTFDLQDLDGFEDISKTIELAQEQQKKYLTMFRDPSGYFFNNETWRPQKEYWSIVNNIIKSCLKKKILSNKVEL

SEQ ID NO: 21 - protein, 1489 aa, Desulfatirhabdium butyrativorans
MPLSNNPPVTQRAYTLRLRGADPSDLSWREALWHTHEAVNKGAKVFGDWLLTLRGGLDHTLADTKVKGGKGKPDRDPTPEERKARRILLALSWLSVESKLGAPSSYIVASGDEPAKDRNDNVVSALEEILQSRKVAKSEIDDWKRDCSASLSAAIRDDAVWVNRSKVFDEAVKSVGSSLTREEAWDMLERFFGSRDAYLTPMKDPEDKSSETEQEDKAKDLVQKAGQWLSSRYGTSEGADFCRMSDIYGKIAAWADNASQGGSSTVDDLVSELRQHFDTKESKATNGLDWIIGLSSYTGHTPNPVHELLRQNTSLNKSHLDDLKKKANTRAESCKSKIGSKGQRPYSDAILNDVESVCGFTYRVDKDGQPVSVADYSKYDVDYKWGTARHYIFAVMLDHAARRISLAHKWIKRAEAERHKFEEDAKRIANVPARAREWLDSFCKERSVTSGAVEPYRIRRRAVDGWKEVVAAWSKSDCKSTEDRIAAARALQDDSEIDKFGDIQLFEALAEDDALCVWHKDGEATNEPDFQPLIDYSLAIEAEFKKRQFKVPAYRHPDELLHPVFCDFGKSRWKINYDVHKNVQAPFYRGLCLTLWTGSEIKPVPLCWQSKRLTRDLALGNNHRNDAASAVTRADRLGRAASNVTKSDMVNITGLFEQADWNGRLQAPRQQLEAIAVVRDNPRLSEQERNLRMCGMIEHIRWLVTFSVKLQPQGPWCAYAEQHGLNTNPQYWPHADTNRDRKVHARLILPRLPGLRVLSVDLGHRYAAACAVWEAVNTETVKEACQNVGRDMPKEHDLYLHIKVKKQGIGKQTEVDKTTIYRRIGADTLPDGRPHPAPWARLDRQFLIKLQGEEKDAREASNEEIWALHQMECKLDRTKPLIDRLIASGWGLLKRQMARLDALKELGWIPAPDSSENLSREDGEAKDYRESLAVDDLMFSAVRTLRLALQRHGNRARIAYYLISEVKIRPGGIQEKLDENGRIDLLQDALALWHELFSSPGWRDEAAKQLWDSRIATLAGYKAPEENGDNVSDVAYRKKQQVYREQLRNVAKTLSGDVITCKELSDAWKERWEDEDQRWKKLLRWFKDWVLPSGTQANNATIRNVGGLSLSRLATITEFRRKVQVGFFTRLRPDGTRHEIGEQFGQKTLDALELLREQRVKQLASRIAEAALGIGSEGGKGWDGGKRPRQRINDSRFAPCHAVVIENLANYRPDETRTRLENRRLMTWSASKVHKYLSEACQLNGLYLCTVSAWYTSRQDSRTGAPGIRCQDVSVREFMQSPFWRKQVKQAEAKHDENKGDARERFLCELNKTWKAKTPAEWKKAGFVRIPLRGGEIFVSADSKSPSAKGIHADLNAAANIGLRALTDPDWPGKWWYVPCDPVSFESKMDYVKGCAAVKVGQPLRQPAQTNADGAASKIRKGKKNRTAGTSKEKVYLWRDISAFPLESNEIGEWKETSAYQNDVQYRVIRMLKEHIKSLDNRTGDNVEG

SEQ ID NO: 22 - protein, 1194 aa, Desulfonatronum thiodismutans
MVLGRKDDTAELRRALWTTHEHVNLAVAEVERVLLRCRGRSYWTLDRRGDPVHVPESQVAEDALAMAREAQRRNGWPVVGEDEEILLALRYLYEQIVPSCLLDDLGKPLKGDAQKIGTNYAGPLFDSDTCRRDEGKDVACCGPFHEVAGKYLGALPEWATPISKQEFDGKDASHLRFKATGGDDAFFRVSIEKANAWYEDPANQDALKNKAYNKDDWKKEKDKGISSWAVKYIQKQLQLGQDPRTEVRRKLWLELGLLPLFIPVFDKTMVGNLWNRLAVRLALAHLLSWESWNHRAVQDQALARAKRDELAALFLGMEDGFAGLREYELRRNESIKQHAFEPVDRPYVVSGRALRSWTRVREEWLRHGDTQESRKNICNRLQDRLRGKFGDPDVFHWLAEDGQEALWKERDCVTSFSLLNDADGLLEKRKGYALMTFADARLHPRWAMYEAPGGSNLRTYQIRKTENGLWADVVLLSPRNESAAVEEKTFNVRLAPSGQLSNVSFDQIQKGSKMVGRCRYQSANQQFEGLLGGAEILFDRKRIANEQHGATDLASKPGHVWFKLTLDVRPQAPQGWLDGKGRPALPPEAKHFKTALSNKSKFADQVRPGLRVLSVDLGVRSFAACSVFELVRGGPDQGTYFPAADGRTVDDPEKLWAKHERSFKITLPGENPSRKEEIARRAAMEELRSLNGDIRRLKAILRLSVLQEDDPRTEHLRLFMEAIVDDPAKSALNAELFKGFGDDRFRSTPDLWKQHCHFFHDKAEKVVAERFSRWRTETRPKSSSWQDWRERRGYAGGKSYWAVTYLEAVRGLILRWNMRGRTYGEVNRQDKKQFGTVASALLHHINQLKEDRIKTGADMIIQAARGFVPRKNGAGWVQVHEPCRLILFEDLARYRFRTDRSRRENSRLMRWSHREIVNEVGMQGELYGLHVDTTEAGFSSRYLASSGAPGVRCRHLVEEDFHDGLPGMHLVGELDWLLPKDKDRTANEARRLLGGMVRPGMLVPWDGGELFATLNAASQLHVIHADINAAQNLQRRFWGRCGEAIRIVCNQLSVDGSTRYEMAKAPKARLLGALQQLKNGDAPFHLTSIPNSQKPENSYVMTPTNAGKKYRAGPGEKSSGEEDELALDIVEQAEELAQGRKTFFRDPSGVFFAPDRWLPSEIYWSRIRRRIWQVTLERNSSGRQERAEMDEMPY

SEQ ID NO: 23 - protein, 1326 aa, Lentisphaeria bacterium
MAVELNRIYQGRVNHVYIFDENQNQVSVDNGDDLLFVHHELYQDAINYYLVALAAMALDSKDSLFGKFKMQIRAVWNDFYRNGQLRPGLKHSLIRSLGHAAELNTSNGADIAMNLILEDGGIPSEILNAALEHLAEKCTGDVSQLGKTFFPRFCDTAYHGNWDVDAKSFSEKKGRQRLVDALYSLHPVQAVQELAPEIEIGWGGVKTQTGKFFTGDEAKASLKKAISYFLQDTGKNSPELQEYFSVAGKQPLEQYLGKIDTFPEISFGRISSHQNINISNAMWILKFFPDQYSVDLIKNLIPNKKYEIGIAPQWGDDPVKLSRGKRGYTFRAFTDLAMWEKNWKVFDRAAFSDALKTINQFRNKTQERNDQLKRYCAALNWMDGESSDKKPPVEPADADAVDEAATSVLPILAGDKRWNALLQLQKELGICNDFTENELMDYGLSLRTIRGYQKLRSMMLEKEEKMRAKTADDEEISQALQEIIIKFQSSHRDTIGSVSLFLKLAEPKYFCVWHDADKNQNFASVDMVADAVRYYSYQEEKARLEEPIQITPADARYSRRVSDLYALVYKNAKECKTGYGLRPDGNFVFEIAQKNAKGYAPAKVVLAFSAPRLKRDGLIDKEFSAYYPPVLQAFLREEEAPKQSFKTTAVILMPDWDKNGKRRILLNFPIKLDVSAIHQKTDHRFENQFYFANNTNTCLLWPSYQYKKPVTWYQGKKPFDVVAVDLGQRSAGAVSRITVSTEKREHSVAIGEAGGTQWYAYRKFSGLLRLPGEDATVIRDGQRTEELSGNAGRLSTEEETVQACVLCKMLIGDATLLGGSDEKTIRSFPKQNDKLLIAFRRATGRMKQLQRWLWMLNENGLCDKAKTEISNSDWLVNKNIDNVLKEEKQHREMLPAILLQIADRVLPLRGRKWDWVLNPQSNSFVLQQTAHGSGDPHKKICGQRGLSFARIEQLESLRMRCQALNRILMRKTGEKPATLAEMRNNPIPDCCPDILMRLDAMKEQRINQTANLILAQALGLRHCLHSESATKRKENGMHGEYEKIPGVEPAAFVVLEDLSRYRFSQDRSSYENSRLMKWSHRKILEKLALLCEVFNVPILQVGAAYSSKFSANAIPGFRAEECSIDQLSFYPWRELKDSREKALVEQIRKIGHRLLTFDAKATIIMPRNGGPVFIPFVPSDSKDTLIQADINASFNIGLRGVADATNLLCNNRVSCDRKKDCWQVKRSSNFSKMVYPEKLSLSFDPIKKQEGAGGNFFVLGCSERILTGTSEKSPVFTSSEMAKKYPNLMFGSALWRNEILKLERCCKINQSRLDKFIAKKEVQNEL

SEQ ID NO: 24 - protein, 1090 aa, Laceyella sediminis
MSIRSFKLKIKTKSGVNAEELRRGLWRTHQLINDGIAYYMNWLVLLRQEDLFIRNEETNEIEKRSKEEIQGELLERVHKQQQRNQWSGEVDDQTLLQTLRHLYEEIVPSVIGKSGNASLKARFFLGPLVDPNNKTTKDVSKSGPTPKWKKMKDAGDPNWVQEYEKYMAERQTLVRLEEMGLIPLFPMYTDEVGDIHWLPQASGYTRTWDRDMFQQAIERLLSWESWNRRVRERRAQFEKKTHDFASRFSESDVQWMNKLREYEAQQEKSLEENAFAPNEPYALTKKALRGWERVYHSWMRLDSAASEEAYWQEVATCQTAMRGEFGDPAIYQFLAQKENHDIWRGYPERVIDFAELNHLQRELRRAKEDATFTLPDSVDHPLWVRYEAPGGTNIHGYDLVQDTKRNLTLILDKFILPDENGSWHEVKKVPFSLAKSKQFHRQVWLQEEQKQKKREVVFYDYSTNLPHLGTLAGAKLQWDRNFLNKRTQQQIEETGEIGKVFFNISVDVRPAVEVKNGRLQNGLGKALTVLTHPDGTKIVTGWKAEQLEKWVGESGRVSSLGLDSLSEGLRVMSIDLGQRTSATVSVFEITKEAPDNPYKFFYQLEGTELFAVHQRSFLLALPGENPPQKIKQMREIRWKERNRIKQQVDQLSAILRLHKKVNEDERIQAIDKLLQKVASWQLNEEIATAWNQALSQLYSKAKENDLQWNQAIKNAHHQLEPVVGKQISLWRKDLSTGRQGIAGLSLWSIEELEATKKLLTRWSKRSREPGVVKRIERFETFAKQIQHHINQVKENRLKQLANLIVMTALGYKYDQEQKKWIEVYPACQVVLFENLRSYRFSYERSRRENKKLMEWSHRSIPKLVQMQGELFGLQVADVYAAYSSRYHGRTGAPGIRCHALTEADLRNETNIIHELIEAGFIKEEHRPYLQQGDLVPWSGGELFATLQKPYDNPRILTLHADINAAQNIQKRFWHPSMWFRVNCESVMEGEIVTYVPKNKTVHKKQGKTFRFVKVEGSDVYEWAKWSKNRNKNTFSSITERKPPSSMILFRDPSGTFFKEQEWVEQKTFWGKVQSMIQAYMKKTIVQRMEE

SEQ ID NO: 25 - protein, 1041 aa, Methylobacterium nodulans
MYEAIVLADDANAQLANAFLGPLTDPNSAGFLEAFNKVDRPAPSWLDQVPASDPIDPAVLAEANAWLDTDAGRAWLVDTGAPPRWRSLAAKQDPIWPREFARKLGELRKEAASGTSAIIKALKRDFGVLPLFQPSLAPRILGSRSSLTPWDRLAFRLAVGHLLSWESWCTRARDEHTARVQRLEQFSSAHLKGDLATKVSTLREYERARKEQIAQLGLPMGERDFLITVRMTRGWDDLREKWRRSGDKGQEALHAIIATEQTRKRGRFGDPDLFRWLARPENHHVWADGHADAVGVLARVNAMERLVERSRDTALMTLPDPVAHPRSAQWEAEGGSNLRNYQLEAVGGELQITLPLLKAADDGRCIDTPLSFSLAPSDQLQGVVLTKQDKQQKITYCTNMNEVFEAKLGSADLLLNWDHLRGRIRDRVDAGDIGSAFLKLALDVAHVLPDGVDDQLARAAFHFQSAKGAKSKHADSVQAGLRVLSIDLGVRSFATCSVFELKDTAPTTGVAFPLAEFRLWAVHERSFTLELPGENVGAAGQQWRAQADAELRQLRGGLNRHRQLLRAATVQKGERDAYLTDLREAWSAKELWPFEASLLSELERCSTVADPLWQDTCKRAARLYRTEFGAVVSEWRSRTRSREDRKYAGKSMWSVQHLTDVRRFLQSWSLAGRASGDIRRLDRERGGVFAKDLLDHIDALKDDRLKTGADLIVQAARGFQRNEFGYWVQKHAPCHVILFEDLSRYRMRTDRPRRENSQLMQWAHRGVPDMVGMQGEIYGIQDRRDPDSARKHARQPLAAFCLDTPAAFSSRYHASTMTPGIRCHPLRKREFEDQGFLELLKRENEGLDLNGYKPGDLVPLPGGEVFVCLNANGLSRIHADINAAQNLQRRFWTQHGDAFRLPCGKSAVQGQIRWAPLSMGKRQAGALGGFGYLEPTGHDSGSCQWRKTTEAEWRRLSGAQKDRDEAAAAEDEELQGLEEELLERSGERVVFFRDPSGVVLPTDLWFPSAAFWSIVRAKTVGRLRSHLDAQAEASYAVAAGL

SEQ ID NO: 26 - protein, 1388 aa, Other
MSLNRIYQGRVAAVETGTALAKGNVEWMPAAGGDEVLWQHHELFQAAINYYLVALLALADKNNPVLGPLISQMDNPQSPYHVWGSFRRQGRQRTGLSQAVAPYITPGNNAPTLDEVFRSILAGNPTDRATLDAALMQLLKACDGAGAIQQEGRSYWPKFCDPDSTANFAGDPAMLRREQHRLLLPQVLHDPAITHDSPALGSFDTYSIATPDTRTPQLTGPKARARLEQAITLWRVRLPESAADFDRLASSLKKIPDDDSRLNLQGYVGSSAKGEVQARLFALLLFRHLERSSFTLGLLRSATPPPKNAETPPPAGVPLPAASAADPVRIARGKRSFVFRAFTSLPCWHGGDNIHPTWKSFDIAAFKYALTVINQIEEKTKERQKECAELETDFDYMHGRLAKIPVKYTTGEAEPPPILANDLRIPLLRELLQNIKVDTALTDGEAVSYGLQRRTIRGFRELRRIWRGHAPAGTVFSSELKEKLAGELRQFQTDNSTTIGSVQLFNELIQNPKYWPIWQAPDVETARQWADAGFADDPLAALVQEAELQEDIDALKAPVKLTPADPEYSRRQYDFNAVSKFGAGSRSANRHEPGQTERGHNTFTTEIAARNAADGNRWRATHVRIHYSAPRLLRDGLRRPDTDGNEALEAVPWLQPMMEALAPLPTLPQDLTGMPVFLMPDVTLSGERRILLNLPVTLEPAALVEQLGNAGRWQNQFFGSREDPFALRWPADGAVKTAKGKTHIPWHQDRDHFTVLGVDLGTRDAGALALLNVTAQKPAKPVHRIIGEADGRTWYASLADARMIRLPGEDARLFVRGKLVQEPYGERGRNASLLEWEDARNIILRLGQNPDELLGADPRRHSYPEINDKLLVALRRAQARLARLQNRSWRLRDLAESDKALDEIHAERAGEKPSPLPPLARDDAIKSTDEALLSQRDIIRRSFVQIANLILPLRGRRWEWRPHVEVPDCHILAQSDPGTDDTKRLVAGQRGISHERIEQIEELRRRCQSLNRALRHKPGERPVLGRPAKGEEIADPCPALLEKINRLRDQRVDQTAHAILAAALGVRLRAPSKDRAERRHRDIHGEYERFRAPADFVVIENLSRYLSSQDRARSENTRLMQWCHRQIVQKLRQLCETYGIPVLAVPAAYSSRFSSRDGSAGFRAVHLTPDHRHRMPWSRILARLKAHEEDGKRLEKTVLDEARAVRGLFDRLDRFNAGHVPGKPWRTLLAPLPGGPVFVPLGDATPMQADLNAAINIALRGIAAPDRHDIHHRLRAENKKRILSLRLGTQREKARWPGGAPAVTLSTPNNGASPEDSDALPERVSNLFVDIAGVANFERVTIEGVSQKFATGRGLWASVKQRAWNRVARLNETVTDNNRNEEEDDIPM

SEQ ID NO: 27 - protein, 1345 aa, Franscisella tularensis
MSIYQEFVNKYSLSKTLRFELIPQGKTLENIKARGLILDDEKRAKDYKKAKQIIDKYHQFFIEEILSSVCISEDLLQNYSDVYFKLKKSDDDNLQKDFKSAKDTIKKQISEYIKDSEKFKNLFNQNLIDAKKGQESDLILWLKQSKDNGIELFKANSDITDIDEALEIIKSFKGWTTYFKGFHENRKNVYSSNDIPTSIIYRIVDDNLPKFLENKAKYESLKDKAPEAINYEQIKKDLAEELTFDIDYKTSEVNQRVFSLDEVFEIANFNNYLNQSGITKFNTIIGGKFVNGENTKRKGINEYINLYSQQINDKTLKKYKMSVLFKQILSDTESKSFVIDKLEDDSDVVTTMQSFYEQIAAFKTVEEKSIKETLSLLFDDLKAQKLDLSKIYFKNDKSLTDLSQQVFDDYSVIGTAVLEYITQQIAPKNLDNPSKKEQELIAKKTEKAKYLSLETIKLALEEFNKHRDIDKQCRFEEILANFAAIPMIFDEIAQNKDNLAQISIKYQNQGKKDLLQASAEDDVKAIKDLLDQTNNLLHKLKIFHISQSEDKANILDKDEHFYLVFEECYFELANIVPLYNKIRNYITQKPYSDEKFKLNFENSTLANGWDKNKEPDNTAILFIKDDKYYLGVMNKKNNKIFDDKAIKENKGEGYKKIVYKLLPGANKMLPKVFFSAKSIKFYNPSEDILRIRNHSTHTKNGSPQKGYEKFEFNIEDCRKFIDFYKQSISKHPEWKDFGFRFSDTQRYNSIDEFYREVENQGYKLTFENISESYIDSVVNQGKLYLFQIYNKDFSAYSKGRPNLHTLYWKALFDERNLQDVVYKLNGEAELFYRKQSIPKKITHPAKEAIANKNKDNPKKESVFEYDLIKDKRFTEDKFFFHCPITINFKSSGANKFNDEINLLLKEKANDVHILSIDRGERHLAYYTLVDGKGNIIKQDTFNIIGNDRMKTNYHDKLAAIEKDRDSARKDWKKINNIKEMKEGYLSQVVHEIAKLVIEYNAIVVFEDLNFGFKRGRFKVEKQVYQKLEKMLIEKLNYLVFKDNEFDKTGGVLRAYQLTAPFETFKKMGKQTGIIYYVPAGFTSKICPVTGFVNQLYPKYESVSKSQEFFSKFDKICYNLDKGYFEFSFDYKNFGDKAAKGKWTIASFGSRLINFRNSDKNHNWDTREVYPTKELEKLLKDYSIEYGHGECIKAAICGESDKKFFAKLTSVLNTILQMRNSKTGTELDYLISPVADVNGNFFDSRQAPKNMPQDADANGAYHIGLKGLMLLGRIKNNQEGKKLNLVIKNEEYFEFVQNRNNKRPAATKKAGQAKKKKGSYPYDVPDYAYPYDVPDYAYPYDVPDYA

SEQ ID NO: 28 - protein, 1278 aa, Other
MDYGNGQFERRAPLTKTITLRLKPIGETRETIREQKLLEQDAAFRKLVETVTPIVDDCIRKIADNALCHFGTEYDFSCLGNAISKNDSKAIKKETEKVEKLLAKVLTENLPDGLRKVNDINSAAFIQDTLTSFVQDDADKRVLIQELKGKTVLMQRFLTTRITALTVWLPDRVFENFNIFIENAEKMRILLDSPLNEKIMKFDPDAEQYASLEFYGQCLSQKDIDSYNLIISGIYADDEVKNPGINEIVKEYNQQIRGDKDESPLPKLKKLHKQILMPVEKAFFVRVLSNDSDARSILEKILKDTEMLPSKIIEAMKEADAGDIAVYGSRLHELSHVIYGDHGKLSQIIYDKESKRISELMETLSPKERKESKKRLEGLEEHIRKSTYTFDELNRYAEKNVMAAYIAAVEESCAEIMRKEKDLRTLLSKEDVKIRGNRHNTLIVKNYFNAWTVFRNLIRILRRKSEAEIDSDFYDVLDDSVEVLSLTYKGENLCRSYITKKIGSDLKPEIATYGSALRPNSRWWSPGEKFNVKFHTIVRRDGRLYYFILPKGAKPVELEDMDGDIECLQMRKIPNPTIFLPKLVFKDPEAFFRDNPEADEFVFLSGMKAPVTITRETYEAYRYKLYTVGKLRDGEVSEEEYKRALLQVLTAYKEFLENRMIYADLNFGFKDLEEYKDSSEFIKQVETHNTFMCWAKVSSSQLDDLVKSGNGLLFEIWSERLESYYKYGNEKVLRGYEGVLLSILKDENLVSMRTLLNSRPMLVYRPKESSKPMVVHRDGSRVVDRFDKDGKYIPPEVHDELYRFFNNLLIKEKLGEKARKILDNKKVKVKVLESERVKWSKFYDEQFAVTFSVKKNADCLDTTKDLNAEVMEQYSESNRLILIRNTTDILYYLVLDKNGKVLKQRSLNIINDGARDVDWKERFRQVTKDRNEGYNEWDYSRTSNDLKEVYLNYALKEIAEAVIEYNAILIIEKMSNAFKDKYSFLDDVTFKGFETKLLAKLSDLHFRGIKDGEPCSFTNPLQLCQNDSNKILQDGVIFMVPNSMTRSLDPDTGFIFAINDHNIRTKKAKLNFLSKFDQLKVSSEGCLIMKYSGDSLPTHNTDNRVWNCCCNHPITNYDRETKKVEFIEEPVEELSRVLEENGIETDTELNKLNERENVPGKVVDAIYSLVLNYLRGTVSGVAGQRAVYYSPVTGKKYDISFIQAMNLNRKCDYYRIGSKERGEWTDFVAQLINKRPAATKKAGQAKKKKGSYPYDVPDYAYPYDVPDYAYPYDVPDYA

SEQ ID NO: 29 - protein, 1286 aa, Butyrivibrio proteoclasticus
MLLYENYTKRNQITKSLRLELRPQGKTLRNIKELNLLEQDKAIYALLERLKPVIDEGIKDIARDTLKNCELSFEKLYEHFLSGDKKAYAKESERLKKEIVKTLIKNLPEGIGKISEINSAKYLNGVLYDFIDKTHKDSEEKQNILSDILETKGYLALFSKFLTSRITTLEQSMPKRVIENFEIYAANIPKMQDALERGAVSFAIEYESICSVDYYNQILSQEDIDSYNRLISGIMDEDGAKEKGINQTISEKNIKIKSEHLEEKPFRILKQLHKQILEEREKAFTIDHIDSDEEVVQVTKEAFEQTKEQWENIKKINGFYAKDPGDITLFIVVGPNQTHVLSQLIYGEHDRIRLLLEEYEKNTLEVLPRRTKSEKARYDKFVNAVPKKVAKESHTFDGLQKMTGDDRLFILYRDELARNYMRIKEAYGTFERDILKSRRGIKGNRDVQESLVSFYDELTKFRSALRIINSGNDEKADPIFYNTFDGIFEKANRTYKAENLCRNYVTKSPADDARIMASCLGTPARLRTHWWNGEENFAINDVAMIRRGDEYYYFVLTPDVKPVDLKTKDETDAQIFVQRKGAKSFLGLPKALFKCILEPYFESPEHKNDKNCVIEEYVSKPLTIDRRAYDIFKNGTFKKTNIGIDGLTEEKFKDDCRYLIDVYKEFIAVYTRYSCFNMSGLKRADEYNDIGEFFSDVDTRLCTMEWIPVSFERINDMVDKKEGLLFLVRSMFLYNRPRKPYERTFIQLFSDSNMEHTSMLLNSRAMIQYRAASLPRRVTHKKGSILVALRDSNGEHIPMHIREAIYKMKNNFDISSEDFIMAKAYLAEHDVAIKKANEDIIRNRRYTEDKFFLSLSYTKNADISARTLDYINDKVEEDTQDSRMAVIVTRNLKDLTYVAVVDEKNNVLEEKSLNEIDGVNYRELLKERTKIKYHDKTRLWQYDVSSKGLKEAYVELAVTQISKLATKYNAVVVVESMSSTFKDKFSFLDEQIFKAFEARLCARMSDLSFNTIKEGEAGSISNPIQVSNNNGNSYQDGVIYFLNNAYTRTLCPDTGFVDVFDKTRLITMQSKRQFFAKMKDIRIDDGEMLFTFNLEEYPTKRLLDRKEWTVKIAGDGSYFDKDKGEYVYVNDIVREQIIPALLEDKAVFDGNMAEKFLDKTAISGKSVELIYKWFANALYGIITKKDGEKIYRSPITGTEIDVSKNTTYNFGKKFMFKQEYRGDGDFLDAFLNYMQAQDIAVKRPAATKKAGQAKKKKGSYPYDVPDYAYPYDVPDYAYPYDVPDYA

SEQ ID NO: 30 - protein, 1522 aa, Other
MSNFFKNFTNLYELSKTLRFELKPVGDTLTNMKDHLEYDEKLQTFLKDQNIDDAYQALKPQFDEIHEEFITDSLESKKAKEIDFSEYLDLFQEKKELNDSEKKLRNKIGETFNKAGEKWKKEKYPQYEWKKGSKIANGADILSCQDMLQFIKYKNPEDEKIKNYIDDTLKGFFTYFGGFNQNRANYYETKKEASTAVATRIVHENLPKFCDNVIQFKHIIKRKKDGTVEKTERKTEYLNAYQYLKNNNKITQIKDAETEKMIESTPIAEKIFDVYYFSSCLSQKQIEEYNRIIGHYNLLINLYNQAKRSEGKHLSANEKKYKDLPKFKTLYKQIGCGKKKDLFYTIKCDTEEEANKSRNEGKESHSVEEIINKAQEAINKYFKSNNDCENINTVPDFINYILTKENYEGVYWSKAAMNTISDKYFANYHDLQDRLKEAKVFQKADKKSEDDIKIPEAIELSGLFGVLDSLADWQTTLFKSSILSNEDKLKIITDSQTPSEALLKMIFNDIEKNMESFLKETNDIITLKKYKGNKEGTEKIKQWFDYTLAINRMLKYFLVKENKIKGNSLDTNISEALKTLIYSDDAEWFKWYDALRNYLTQKPQDEAKENKLKLNFDNPSLAGGWDVNKECSNFCVILKDKNEKKYLAIMKKGENTLFQKEWTEGRGKNLTKKSNPLFEINNCEILSKMEYDFWADVSKMIPKCSTQLKAVVNHFKQSDNEFIFPIGYKVTSGEKFREECKISKQDFELNNKVFNKNELSVTAMRYDLSSTQEKQYIKAFQKEYWELLFKQEKRDTKLTNNEIFNEWINFCNKKYSELLSWERKYKDALTNWINFCKYFLSKYPKTTLFNYSFKESENYNSLDEFYRDVDICSYKLNINTTINKSILDRLVEEGKLYLFEIKNQDSNDGKSIGHKNNLHTIYWNAIFENFDNRPKLNGEAEIFYRKAISKDKLGIVKGKKTKNGTEIIKNYRFSKEKFILHVPITLNFCSNNEYVNDIVNTKFYNFSNLHFLGIDRGEKHLAYYSLVNKNGEIVDQGTLNLPFTDKDGNQRSIKKEKYFYNKQEDKWEAKEVDCWNYNDLLDAMASNRDMARKNWQRIGTIKEAKNGYVSLVIRKIADLAVNNERPAFIVLEDLNTGFKRSRQKIDKSVYQKFELALAKKLNFLVDKNAKRDEIGSPTKALQLTPPVNNYGDIENKKQAGIMLYTRANYTSQTDPATGWRKTIYLKAGPEETTYKKDGKIKNKSVKDQIIETFTDIGFDGKDYYFEYDKGEFVDEKTGEIKPKKWRLYSGENGKSLDRFRGEREKDKYEWKIDKIDIVKILDDLFVNFDKNISLLKQLKEGVELTRNNEHGTGESLRFAINLIQQIRNTGNNERDNDFILSPVRDENGKHFDSREYWDKETKGEKISMPSSGDANGAFNIARKGIIMNAHILANSDSKDLSLFVSDEEWDLHLNNKTEWKKQLNIFSSRKAMAKRKKKRPAATKKAGQAKKKKGSYPYDVPDYAYPYDVPDYAYPYDVPDYA

SEQ ID NO: 31 - protein, 1397 aa, Other
MENIFDQFIGKYSLSKTLRFELKPVGKTEDFLKINKVFEKDQTIDDSYNQAKFYFDSLHQKFIDAALASDKTSELSFQNFADVLEKQNKIILDKKREMGALRKRDKNAVGIDRLQKEINDAEDIIQKEKEKIYKDVRTLFDNEAESWKTYYQEREVDGKKITFSKADLKQKGADFLTAAGILKVLKYEFPEEKEKEFQAKNQPSLFVEEKENPGQKRYIFDSFDKFAGYLTKFQQTKKNLYAADGTSTAVATRIADNFIIFHQNTKVFRDKYKNNHTDLGFDEENIFEIERYKNCLLQREIEHIKNENSYNKIIGRINKKIKEYRDQKAKDTKLTKSDFPFFKNLDKQILGEVEKEKQLIEKTREKTEEDVLIERFKEFIENNEERFTAAKKLMNAFCNGEFESEYEGIYLKNKAINTISRRWFVSDRDFELKLPQQKSKNKSEKNEPKVKKFISIAEIKNAVEELDGDIFKAVFYDKKIIAQGGSKLEQFLVIWKYEFEYLFRDIERENGEKLLGYDSCLKIAKQLGIFPQEKEAREKATAVIKNYADAGLGIFQMMKYFSLDDKDRKNTPGQLSTNFYAEYDGYYKDFEFIKYYNEFRNFITKKPFDEDKIKLNFENGALLKGWDENKEYDFMGVILKKEGRLYLGIMHKNHRKLFQSMGNAKGDNANRYQKMIYKQIADASKDVPRLLLTSKKAMEKFKPSQEILRIKKEKTFKRESKNFSLRDLHALIEYYRNCIPQYSNWSFYDFQFQDTGKYQNIKEFTDDVQKYGYKISFRDIDDEYINQALNEGKMYLFEVVNKDIYNTKNGSKNLHTLYFEHILSAENLNDPVFKLSGMAEIFQRQPSVNEREKITTQKNQCILDKGDRAYKYRRYTEKKIMFHMSLVLNTGKGEIKQVQFNKIINQRISSSDNEMRVNVIGIDRGEKNLLYYSVVKQNGEIIEQASLNEINGVNYRDKLIEREKERLKNRQSWKPVVKIKDLKKGYISHVIHKICQLIEKYSAIVVLEDLNMRFKQIRGGIERSVYQQFEKALIDKLGYLVFKDNRDLRAPGGVLNGYQLSAPFVSFEKMRKQTGILFYTQAEYTSKTDPITGFRKNVYISNSASLDKIKEAVKKFDAIGWDGKEQSYFFKYNPYNLADEKYKNSTVSKEWAIFASAPRIRRQKGEDGYWKYDRVKVNEEFEKLLKVWNFVNPKATDIKQEIIKKEKAGDLQGEKELDGRLRNFWHSFIYLFNLVLELRNSFSLQIKIKAGEVIAVDEGVDFIASPVKPFFTTPNPYIPSNLCWLAVENADANGAYNIARKGVMILKKIREHAKKDPEFKKLPNLFISNAEWDEAARDWGKYAGTTALNLDHKRPAATKKAGQAKKKKGSYPYDVPDYAYPYDVPDYAYPYDVPDYA

SEQ ID NO: 32 - protein, 1295 aa, Smithella sp.
MQTLFENFTNQYPVSKTLRFELIPQGKTKDFIEQKGLLKKDEDRAEKYKKVKNIIDEYHKDFIEKSLNGLKLDGLEKYKTLYLKQEKDDKDKKAFDKEKENLRKQIANAFRNNEKFKTLFAKELIKNDLMSFACEEDKKNVKEFEAFTTYFTGFHQNRANMYVADEKRTAIASRLIHENLPKFIDNIKIFEKMKKEAPELLSPFNQTLKDMKDVIKGTTLEEIFSLDYFNKTLTQSGIDIYNSVIGGRTPEEGKTKIKGLNEYINTDFNQKQTDKKKRQPKFKQLYKQILSDRQSLSFIAEAFKNDTEILEAIEKFYVNELLHFSNEGKSTNVLDAIKNAVSNLESFNLTKMYFRSGASLTDVSRKVFGEWSIINRALDNYYATTYPIKPREKSEKYEERKEKWLKQDFNVSLIQTAIDEYDNETVKGKNSGKVIADYFAKFCDDKETDLIQKVNEGYIAVKDLLNTPCPENEKLGSNKDQVKQIKAFMDSIMDIMHFVRPLSLKDTDKEKDETFYSLFTPLYDHLTQTIALYNKVRNYLTQKPYSTEKIKLNFENSTLLGGWDLNKETDNTAIILRKDNLYYLGIMDKRHNRIFRNVPKADKKDFCYEKMVYKLLPGANKMLPKVFFSQSRIQEFTPSAKLLENYANETHKKGDNFNLNHCHKLIDFFKDSINKHEDWKNFDFRFSATSTYADLSGFYHEVEHQGYKISFQSVADSFIDDLVNEGKLYLFQIYNKDFSPFSKGKPNLHTLYWKMLFDENNLKDVVYKLNGEAEVFYRKKSIAEKNTTIHKANESIINKNPDNPKATSTFNYDIVKDKRYTIDKFQFHIPITMNFKAEGIFNMNQRVNQFLKANPDINIIGIDRGERHLLYYALINQKGKILKQDTLNVIANEKQKVDYHNLLDKKEGDRATARQEWGVIETIKELKEGYLSQVIHKLTDLMIENNAIIVMEDLNFGFKRGRQKVEKQVYQKFEKMLIDKLNYLVDKNKKANELGGLLNAFQLANKFESFQKMGKQNGFIFYVPAWNTSKTDPATGFIDFLKPRYENLNQAKDFFEKFDSIRLNSKADYFEFAFDFKNFTEKADGGRTKWTVCTTNEDRYAWNRALNNNRGSQEKYDITAELKSLFDGKVDYKSGKDLKQQIASQESADFFKALMKNLSITLSLRHNNGEKGDNEQDYILSPVADSKGRFFDSRKADDDMPKNADANGAYHIALKGLWCLEQISKTDDLKKVKLAISNKEWLEFVQTLKGKRPAATKKAGQAKKKKGSYPYDVPDYAYPYDVPDYAYPYDVPDYA

SEQ ID NO: 33 - protein, 1352 aa, Acidaminococcus sp.
MTQFEGFTNLYQVSKTLRFELIPQGKTLKHIQEQGFIEEDKARNDHYKELKPIIDRIYKTYADQCLQLVQLDWENLSAAIDSYRKEKTEETRNALIEEQATYRNAIHDYFIGRTDNLTDAINKRHAEIYKGLFKAELFNGKVLKQLGTVTTTEHENALLRSFDKFTTYFSGFYENRKNVFSAEDISTAIPHRIVQDNFPKFKENCHIFTRLITAVPSLREHFENVKKAIGIFVSTSIEEVFSFPFYNQLLTQTQIDLYNQLLGGISREAGTEKIKGLNEVLNLAIQKNDETAHIIASLPHRFIPLFKQILSDRNTLSFILEEFKSDEEVIQSFCKYKTLLRNENVLETAEALFNELNSIDLTHIFISHKKLETISSALCDHWDTLRNALYERRISELTGKITKSAKEKVQRSLKHEDINLQEIISAAGKELSEAFKQKTSEILSHAHAALDQPLPTTLKKQEEKEILKSQLDSLLGLYHLLDWFAVDESNEVDPEFSARLTGIKLEMEPSLSFYNKARNYATKKPYSVEKFKLNFQMPTLASGWDVNKEKNNGAILFVKNGLYYLGIMPKQKGRYKALSFEPTEKTSEGFDKMYYDYFPDAAKMIPKCSTQLKAVTAHFQTHTTPILLSNNFIEPLEITKEIYDLNNPEKEPKKFQTAYAKKTGDQKGYREALCKWIDFTRDFLSKYTKTTSIDLSSLRPSSQYKDLGEYYAELNPLLYHISFQRIAEKEIMDAVETGKLYLFQIYNKDFAKGHHGKPNLHTLYWTGLFSPENLAKTSIKLNGQAELFYRPKSRMKRMAHRLGEKMLNKKLKDQKTPIPDTLYQELYDYVNHRLSHDLSDEARALLPNVITKEVSHEIIKDRRFTSDKFFFHVPITLNYQAANSPSKFNQRVNAYLKEHPETPIIGIDRGERNLIYITVIDSTGKILEQRSLNTIQQFDYQKKLDNREKERVAARQAWSVVGTIKDLKQGYLSQVIHEIVDLMIHYQAVVVLENLNFGFKSKRTGIAEKAVYQQFEKMLIDKLNCLVLKDYPAEKVGGVLNPYQLTDQFTSFAKMGTQSGFLFYVPAPYTSKIDPLTGFVDPFVWKTIKNHESRKHFLEGFDFLHYDVKTGDFILHFKMNRNLSFQRGLPGFMPAWDIVFEKNETQFDAKGTPFIAGKRIVPVIENHRFTGRYRDLYPANELIALLEEKGIVFRDGSNILPKLLENDDSHAIDTMVALIRSVLQMRNSNAATGEDYINSPVRDLNGVCFDSRFQNPEWPMDADANGAYHIALKGQLLLNHLKESKDLKLQNGISNQDWLAYIQELRNKRPAATKKAGQAKKKKGSYPYDVPDYAYPYDVPDYAYPYDVPDYA

SEQ ID NO: 34 - protein, 1251 aa, Other
MYYESLTKQYPVSKTIRNELIPIGKTLDNIRQNNILESDVKRKQNYEHVKGILDEYHKQLINEALDNCTLPSLKIAAEIYLKNQKEVSDREDFNKTQDLLRKEVVEKLKAHENFTKIGKKDILDLLEKLPSISEDDYNALESFRNFYTYFTSYNKVRENLYSDKEKSSTVAYRLINENFPKFLDNVKSYRFVKTAGILADGLGEEEQDSLFIVETFNKTLTQDGIDTYNSQVGKINSSINLYNQKNQKANGFRKIPKMKMLYKQILSDREESFIDEFQSDEVLIDNVESYGSVLIESLKSSKVSAFFDALRESKGKNVYVKNDLAKTAMSNIVFENWRTFDDLLNQEYDLANENKKKDDKYFEKRQKELKKNKSYSLEHLCNLSEDSCNLIENYIHQISDDIENIIINNETFLRIVINEHDRSRKLAKNRKAVKAIKDFLDSIKVLERELKLINSSGQELEKDLIVYSAHEELLVELKQVDSLYNMTRNYLTKKPFSTEKVKLNFNRSTLLNGWDRNKETDNLGVLLLKDGKYYLGIMNTSANKAFVNPPVAKTEKVFKKVDYKLLPVPNQMLPKVFFAKSNIDFYNPSSEIYSNYKKGTHKKGNMFSLEDCHNLIDFFKESISKHEDWSKFGFKFSDTASYNDISEFYREVEKQGYKLTYTDIDETYINDLIERNELYLFQIYNKDFSMYSKGKLNLHTLYFMMLFDQRNIDDVVYKLNGEAEVFYRPASISEDELIIHKAGEEIKNKNPNRARTKETSTFSYDIVKDKRYSKDKFTLHIPITMNFGVDEVKRFNDAVNSAIRIDENVNVIGIDRGERNLLYVVVIDSKGNILEQISLNSIINKEYDIETDYHALLDEREGGRDKARKDWNTVENIRDLKAGYLSQVVNVVAKLVLKYNAIICLEDLNFGFKRGRQKVEKQVYQKFEKMLIDKLNYLVIDKSREQTSPKELGGALNALQLTSKFKSFKELGKQSGVIYYVPAYLTSKIDPTTGFANLFYMKCENVEKSKRFFDGFDFIRFNALENVFEFGFDYRSFTQRACGINSKWTVCTNGERIIKYRNPDKNNMFDEKVVVVTDEMKNLFEQYKIPYEDGRNVKDMIISNEEAEFYRRLYRLLQQTLQMRNSTSDGTRDYIISPVKNKREAYFNSELSDGSVPKDADANGAYNIARKGLWVLEQIRQKSEGEKINLAMTNAEWLEYAQTHLLKRPAATKKAGQAKKKKGSYPYDVPDYAYPYDVPDYAYPYDVPDYA

SEQ ID NO: 35 - protein, 1283 aa, Other
MNNYDEFTKLYPIQKTIRFELKPQGRTMEHLETFNFFEEDRDRAEKYKILKEAIDEYHKKFIDEHLTNMSLDWNSLKQISEKYYKSREEKDKKVFLSEQKRMRQEIVSEFKKDDRFKDLFSKKLFSELLKEEIYKKGNHQEIDALKSFDKFSGYFIGLHENRKNMYSDGDEITAISNRIVNENFPKFLDNLQKYQEARKKYPEWIIKAESALVAHNIKMDEVFSLEYFNKVLNQEGIQRYNLALGGYVTKSGEKMMGLNDALNLAHQSEKSSKGRIHMTPLFKQILSEKESFSYIPDVFTEDSQLLPSIGGFFAQIENDKDGNIFDRALELISSYAEYDTERIYIRQADINRVSNVIFGEWGTLGGLMREYKADSINDINLERTCKKVDKWLDSKEFALSDVLEAIKRTGNNDAFNEYISKMRTAREKIDAARKEMKFISEKISGDEESIHIIKTLLDSVQQFLHFFNLFKARQDIPLDGAFYAEFDEVHSKLFAIVPLYNKVRNYLTKNNLNTKKIKLNFKNPTLANGWDQNKVYDYASLIFLRDGNYYLGIINPKRKKNIKFEQGSGNGPFYRKMVYKQIPGPNKNLPRVFLTSTKGKKEYKPSKEIIEGYEADKHIRGDKFDLDFCHKLIDFFKESIEKHKDWSKFNFYFSPTESYGDISEFYLDVEKQGYRMHFENISAETIDEYVEKGDLFLFQIYNKDFVKAATGKKDMHTIYWNAAFSPENLQDVVVKLNGEAELFYRDKSDIKEIVHREGEILVNRTYNGRTPVPDKIHKKLTDYHNGRTKDLGEAKEYLDKVRYFKAHYDITKDRRYLNDKIYFHVPLTLNFKANGKKNLNKMVIEKFLSDEKAHIIGIDRGERNLLYYSIIDRSGKIIDQQSLNVIDGFDYREKLNQREIEMKDARQSWNAIGKIKDLKEGYLSKAVHEITKMAIQYNAIVVMEELNYGFKRGRFKVEKQIYQKFENMLIDKMNYLVFKDAPDESPGGVLNAYQLTNPLESFAKLGKQTGILFYVPAAYTSKIDPTTGFVNLFNTSSKTNAQERKEFLQKFESISYSAKDGGIFAFAFDYRKFGTSKTDHKNVWTAYTNGERMRYIKEKKRNELFDPSKEIKEALTSSGIKYDGGQNILPDILRSNNNGLIYTMYSSFIAAIQMRVYDGKEDYIISPIKNSKGEFFRTDPKRRELPIDADANGAYNIALRGELTMRAIAEKFDPDSEKMAKLELKHKDWFEFMQTRGDKRPAATKKAGQAKKKKGSYPYDVPDYAYPYDVPDYAYPYDVPDYA

SEQ ID NO: 36 - protein, 1327 aa, Eubacterium eligens
MNGNRSIVYREFVGVIPVAKTLRNELRPVGHTQEHIIQNGLIQEDELRQEKSTELKNIMDDYYREYIDKSLSGVTDLDFTLLFELMNLVQSSPSKDNKKALEKEQSKMREQICTHLQSDSNYKNIFNAKLLKEILPDFIKNYNQYDVKDKAGKLETLALFNGFSTYFTDFFEKRKNVFTKEAVSTSIAYRIVHENSLIFLANMTSYKKISEKALDEIEVIEKNNQDKMGDWELNQIFNPDFYNMVLIQSGIDFYNEICGVVNAHMNLYCQQTKNNYNLFKMRKLHKQILAYTSTSFEVPKMFEDDMSVYNAVNAFIDETEKGNIIGKLKDIVNKYDELDEKRIYISKDFYETLSCFMSGNWNLITGCVENFYDENIHAKGKSKEEKVKKAVKEDKYKSINDVNDLVEKYIDEKERNEFKNSNAKQYIREISNIITDTETAHLEYDDHISLIESEEKADEMKKRLDMYMNMYHWAKAFIVDEVLDRDEMFYSDIDDIYNILENIVPLYNRVRNYVTQKPYNSKKIKLNFQSPTLANGWSQSKEFDNNAIILIRDNKYYLAIFNAKNKPDKKIIQGNSDKKNDNDYKKMVYNLLPGANKMLPKVFLSKKGIETFKPSDYIISGYNAHKHIKTSENFDISFCRDLIDYFKNSIEKHAEWRKYEFKFSATDSYSDISEFYREVEMQGYRIDWTYISEADINKLDEEGKIYLFQIYNKDFAENSTGKENLHTMYFKNIFSEENLKDIIIKLNGQAELFYRRASVKNPVKHKKDSVLVNKTYKNQLDNGDVVRIPIPDDIYNEIYKMYNGYIKESDLSEAAKEYLDKVEVRTAQKDIVKDYRYTVDKYFIHTPITINYKVTARNNVNDMVVKYIAQNDDIHVIGIDRGERNLIYISVIDSHGNIVKQKSYNILNNYDYKKKLVEKEKTREYARKNWKSIGNIKELKEGYISGVVHEIAMLIVEYNAIIAMEDLNYGFKRGRFKVERQVYQKFESMLINKLNYFASKEKSVDEPGGLLKGYQLTYVPDNIKNLGKQCGVIFYVPAAFTSKIDPSTGFISAFNFKSISTNASRKQFFMQFDEIRYCAEKDMFSFGFDYNNFDTYNITMGKTQWTVYTNGERLQSEFNNARRTGKTKSINLTETIKLLLEDNEINYADGHDIRIDMEKMDEDKKSEFFAQLLSLYKLTVQMRNSYTEAEEQENGISYDKIISPVINDEGEFFDSDNYKESDDKECKMPKDADANGAYCIALKGLYEVLKIKSEWTEDGFDRNCLKLPHAEWLDFIQNKRYEKRPAATKKAGQAKKKKGSYPYDVPDYAYPYDVPDYAYPYDVPDYA

SEQ ID NO: 37 - protein, 1418 aa, Moraxella bovoculi
MLFQDFTHLYPLSKTVRFELKPIDRTLEHIHAKNFLSQDETMADMHQKVKVILDDYHRDFIADMMGEVKLTKLAEFYDVYLKFRKNPKDDELQKQLKDLQAVLRKEIVKPIGNGGKYKAGYDRLFGAKLFKDGKELGDLAKFVIAQEGESSPKLAHLAHFEKFSTYFTGFHDNRKNMYSDEDKHTAIAYRLIHENLPRFIDNLQILTTIKQKHSALYDQIINELTASGLDVSLASHLDGYHKLLTQEGITAYNTLLGGISGEAGSPKIQGINELINSHHNQHCHKSERIAKLRPLHKQILSDGMSVSFLPSKFADDSEMCQAVNEFYRHYADVFAKVQSLFDGFDDHQKDGIYVEHKNLNELSKQAFGDFALLGRVLDGYYVDVVNPEFNERFAKAKTDNAKAKLTKEKDKFIKGVHSLASLEQAIEHYTARHDDESVQAGKLGQYFKHGLAGVDNPIQKIHNNHSTIKGFLERERPAGERALPKIKSGKNPEMTQLRQLKELLDNALNVAHFAKLLTTKTTLDNQDGNFYGEFGVLYDELAKIPTLYNKVRDYLSQKPFSTEKYKLNFGNPTLLNGWDLNKEKDNFGVILQKDGCYYLALLDKAHKKVFDNAPNTGKSIYQKMIYKYLEVRKQFPKVFFSKEAIAINYHPSKELVEIKDKGRQRSDDERLKLYRFILECLKIHPKYDKKFEGAIGDIQLFKKDKKGREVPISEKDLFDKINGIFSSKPKLEMEDFFIGEFKRYNPSQDLVDQYNIYKKIDSNDNRKKENFYNNHPKFKKDLVRYYYESMCKHEEWEESFEFSKKLQDIGCYVDVNELFTEIETRRLNYKISFCNINADYIDELVEQGQLYLFQIYNKDFSPKAHGKPNLHTLYFKALFSEDNLADPIYKLNGEAQIFYRKASLDMNETTIHRAGEVLENKNPDNPKKRQFVYDIIKDKRYTQDKFMLHVPITMNFGVQGMTIKEFNKKVNQSIQQYDEVNVIGIDRGERHLLYLTVINSKGEILEQCSLNDITTASANGTQMTTPYHKILDKREIERLNARVGWGEIETIKELKSGYLSHVVHQISQLMLKYNAIVVLEDLNFGFKRGRFKVEKQIYQNFENALIKKLNHLVLKDKADDEIGSYKNALQLTNNFTDLKSIGKQTGFLFYVPAWNTSKIDPETGFVDLLKPRYENIAQSQAFFGKFDKICYNADKDYFEFHIDYAKFTDKAKNSRQIWTICSHGDKRYVYDKTANQNKGAAKGINVNDELKSLFARHHINEKQPNLVMDICQNNDKEFHKSLMYLLKTLLALRYSNASSDEDFILSPVANDEGVFFNSALADDTQPQNADANGAYHIALKGLWLLNELKNSDDLNKVKLAIDNQTWLNFAQNRKRPAATKKAGQAKKKKGSYPYDVPDYAYPYDVPDYAYPYDVPDYA

SEQ ID NO: 38 - protein, 1308 aa, Leptospira inadai
MEDYSGFVNIYSIQKTLRFELKPVGKTLEHIEKKGFLKKDKIRAEDYKAVKKIIDKYHRAYIEEVFDSVLHQKKKKDKTRFSTQFIKEIKEFSELYYKTEKNIPDKERLEALSEKLRKMLVGAFKGEFSEEVAEKYKNLFSKELIRNEIEKFCETDEERKQVSNFKSFTTYFTGFHSNRQNIYSDEKKSTAIGYRIIHQNLPKFLDNLKIIESIQRRFKDFPWSDLKKNLKKIDKNIKLTEYFSIDGFVNVLNQKGIDAYNTILGGKSEESGEKIQGLNEYINLYRQKNNIDRKNLPNVKILFKQILGDRETKSFIPEAFPDDQSVLNSITEFAKYLKLDKKKKSIIAELKKFLSSFNRYELDGIYLANDNSLASISTFLFDDWSFIKKSVSFKYDESVGDPKKKIKSPLKYEKEKEKWLKQKYYTISFLNDAIESYSKSQDEKRVKIRLEAYFAEFKSKDDAKKQFDLLERIEEAYAIVEPLLGAEYPRDRNLKADKKEVGKIKDFLDSIKSLQFFLKPLLSAEIFDEKDLGFYNQLEGYYEEIDSIGHLYNKVRNYLTGKIYSKEKFKLNFENSTLLKGWDENREVANLCVIFREDQKYYLGVMDKENNTILSDIPKVKPNELFYEKMVYKLIPTPHMQLPRIIFSSDNLSIYNPSKSILKIREAKSFKEGKNFKLKDCHKFIDFYKESISKNEDWSRFDFKFSKTSSYENISEFYREVERQGYNLDFKKVSKFYIDSLVEDGKLYLFQIYNKDFSIFSKGKPNLHTIYFRSLFSKENLKDVCLKLNGEAEMFFRKKSINYDEKKKREGHHPELFEKLKYPILKDKRYSEDKFQFHLPISLNFKSKERLNFNLKVNEFLKRNKDINIIGIDRGERNLLYLVMINQKGEILKQTLLDSMQSGKGRPEINYKEKLQEKEIERDKARKSWGTVENIKELKEGYLSIVIHQISKLMVENNAIVVLEDLNIGFKRGRQKVERQVYQKFEKMLIDKLNFLVFKENKPTEPGGVLKAYQLTDEFQSFEKLSKQTGFLFYVPSWNTSKIDPRTGFIDFLHPAYENIEKAKQWINKFDSIRFNSKMDWFEFTADTRKFSENLMLGKNRVWVICTTNVERYFTSKTANSSIQYNSIQITEKLKELFVDIPFSNGQDLKPEILRKNDAVFFKSLLFYIKTTLSLRQNNGKKGEEEKDFILSPVVDSKGRFFNSLEASDDEPKDADANGAYHIALKGLMNLLVLNETKEENLSRPKWKIKNKDWLEFVWERNRKRPAATKKAGQAKKKKGSYPYDVPDYAYPYDVPDYAYPYDVPDYA

SEQ ID NO: 39 - protein, 1273 aa, Other
MSKLEKFTNCYSLSKTLRFKAIPVGKTQENIDNKRLLVEDEKRAEDYKGVKKLLDRYYLSFINDVLHSIKLKNLNNYISLFRKKTRTEKENKELENLEINLRKEIAKAFKGNEGYKSLFKKDIIETILPEFLDDKDEIALVNSFNGFTTAFTGFFDNRENMFSEEAKSTSIAFRCINENLTRYISNMDIFEKVDAIFDKHEVQEIKEKILNSDYDVEDFFEGEFFNFVLTQEGIDVYNAIIGGFVTESGEKIKGLNEYINLYNQKTKQKLPKFKPLYKQVLSDRESLSFYGEGYTSDEEVLEVFRNTLNKNSEIFSSIKKLEKLFKNFDEYSSAGIFVKNGPAISTISKDIFGEWNVIRDKWNAEYDDIHLKKKAVVTEKYEDDRRKSFKKIGSFSLEQLQEYADADLSVVEKLKEIIIQKVDEIYKVYGSSEKLFDADFVLEKSLKKNDAVVAIMKDLLDSVKSFENYIKAFFGEGKETNRDESFYGDFVLAYDILLKVDHIYDAIRNYVTQKPYSKDKFKLYFQNPQFMGGWDKDKETDYRATILRYGSKYYLAIMDKKYAKCLQKIDKDDVNGNYEKINYKLLPGPNKMLPKVFFSKKWMAYYNPSEDIQKIYKNGTFKKGDMFNLNDCHKLIDFFKDSISRYPKWSNAYDFNFSETEKYKDIAGFYREVEEQGYKVSFESASKKEVDKLVEEGKLYMFQIYNKDFSDKSHGTPNLHTMYFKLLFDENNHGQIRLSGGAELFMRRASLKKEELVVHPANSPIANKNPDNPKKTTTLSYDVYKDKRFSEDQYELHIPIAINKCPKNIFKINTEVRVLLKHDDNPYVIGIDRGERNLLYIVVVDGKGNIVEQYSLNEIINNFNGIRIKTDYHSLLDKKEKERFEARQNWTSIENIKELKAGYISQVVHKICELVEKYDAVIALEDLNSGFKNSRVKVEKQVYQKFEKMLIDKLNYMVDKKSNPCATGGALKGYQITNKFESFKSMSTQNGFIFYIPAWLTSKIDPSTGFVNLLKTKYTSIADSKKFISSFDRIMYVPEEDLFEFALDYKNFSRTDADYIKKWKLYSYGNRIRIFRNPKKNNVFDWEEVCLTSAYKELFNKYGINYQQGDIRALLCEQSDKAFYSSFMALMSLMLQMRNSITGRTDVDFLISPVKNSDGIFYDSRNYEAQENAILPKNADANGAYNIARKVLWAIGQFKKAEDEKLDKVKIAISNKEWLEYAQTSVKHKRPAATKKAGQAKKKKGSYPYDVPDYAYPYDVPDYAYPYDVPDYA

SEQ ID NO: 40 - protein, 1305 aa, Porphyromonas crevioricanis
MDSLKDFTNLYPVSKTLRFELKPVGKTLENIEKAGILKEDEHRAESYRRVKKIIDTYHKVFIDSSLENMAKMGIENEIKAMLQSFCELYKKDHRTEGEDKALDKIRAVLRGLIVGAFTGVCGRRENTVQNEKYESLFKEKLIKEILPDFVLSTEAESLPFSVEEATRSLKEFDSFTSYFAGFYENRKNIYSTKPQSTAIAYRLIHENLPKFIDNILVFQKIKEPIAKELEHIRADFSAGGYIKKDERLEDIFSLNYYIHVLSQAGIEKYNALIGKIVTEGDGEMKGLNEHINLYNQQRGREDRLPLFRPLYKQILSDREQLSYLPESFEKDEELLRALKEFYDHIAEDILGRTQQLMTSISEYDLSRIYVRNDSQLTDISKKMLGDWNAIYMARERAYDHEQAPKRITAKYERDRIKALKGEESISLANLNSCIAFLDNVRDCRVDTYLSTLGQKEGPHGLSNLVENVFASYHEAEQLLSFPYPEENNLIQDKDNVVLIKNLLDNISDLQRFLKPLWGMGDEPDKDERFYGEYNYIRGALDQVIPLYNKVRNYLTRKPYSTRKVKLNFGNSQLLSGWDRNKEKDNSCVILRKGQNFYLAIMNNRHKRSFENKMLPEYKEGEPYFEKMDYKFLPDPNKMLPKVFLSKKGIEIYKPSPKLLEQYGHGTHKKGDTFSMDDLHELIDFFKHSIEAHEDWKQFGFKFSDTATYENVSSFYREVEDQGYKLSFRKVSESYVYSLIDQGKLYLFQIYNKDFSPCSKGTPNLHTLYWRMLFDERNLADVIYKLDGKAEIFFREKSLKNDHPTHPAGKPIKKKSRQKKGEESLFEYDLVKDRRYTMDKFQFHVPITMNFKCSAGSKVNDMVNAHIREAKDMHVIGIDRGERNLLYICVIDSRGTILDQISLNTINDIDYHDLLESRDKDRQQEHRNWQTIEGIKELKQGYLSQAVHRIAELMVAYKAVVALEDLNMGFKRGRQKVESSVYQQFEKQLIDKLNYLVDKKKRPEDIGGLLRAYQFTAPFKSFKEMGKQNGFLFYIPAWNTSNIDPTTGFVNLFHVQYENVDKAKSFFQKFDSISYNPKKDWFEFAFDYKNFTKKAEGSRSMWILCTHGSRIKNFRNSQKNGQWDSEEFALTEAFKSLFVRYEIDYTADLKTAIVDEKQKDFFVDLLKLFKLTVQMRNSWKEKDLDYLISPVAGADGRFFDTREGNKSLPKDADANGAYNIALKGLWALRQIRQTSEGGKLKLAISNKEWLQFVQERSYEKDKRPAATKKAGQAKKKKGSYPYDVPDYAYPYDVPDYAYPYDVPDYA

SEQ ID NO: 41 - protein, 1368 aa, Prevotella disiens
MENYQEFTNLFQLNKTLRFELKPIGKTCELLEEGKIFASGSFLEKDKVRADNVSYVKKEIDKKHKIFIEETLSSFSISNDLLKQYFDCYNELKAFKKDCKSDEEEVKKTALRNKCTSIQRAMREAISQAFLKSPQKKLLAIKNLIENVFKADENVQHFSEFTSYFSGFETNRENFYSDEEKSTSIAYRLVHDNLPIFIKNIYIFEKLKEQFDAKTLSEIFENYKLYVAGSSLDEVFSLEYFNNTLTQKGIDNYNAVIGKIVKEDKQEIQGLNEHINLYNQKHKDRRLPFFISLKKQILSDREALSWLPDMFKNDSEVIKALKGFYIEDGFENNVLTPLATLLSSLDKYNLNGIFIRNNEALSSLSQNVYRNFSIDEAIDANAELQTFNNYELIANALRAKIKKETKQGRKSFEKYEEYIDKKVKAIDSLSIQEINELVENYVSEFNSNSGNMPRKVEDYFSLMRKGDFGSNDLIENIKTKLSAAEKLLGTKYQETAKDIFKKDENSKLIKELLDATKQFQHFIKPLLGTGEEADRDLVFYGDFLPLYEKFEELTLLYNKVRNRLTQKPYSKDKIRLCFNKPKLMTGWVDSKTEKSDNGTQYGGYLFRKKNEIGEYDYFLGISSKAQLFRKNEAVIGDYERLDYYQPKANTIYGSAYEGENSYKEDKKRLNKVIIAYIEQIKQTNIKKSIIESISKYPNISDDDKVTPSSLLEKIKKVSIDSYNGILSFKSFQSVNKEVIDNLLKTISPLKNKAEFLDLINKDYQIFTEVQAVIDEICKQKTFIYFPISNVELEKEMGDKDKPLCLFQISNKDLSFAKTFSANLRKKRGAENLHTMLFKALMEGNQDNLDLGSGAIFYRAKSLDGNKPTHPANEAIKCRNVANKDKVSLFTYDIYKNRRYMENKFLFHLSIVQNYKAANDSAQLNSSATEYIRKADDLHIIGIDRGERNLLYYSVIDMKGNIVEQDSLNIIRNNDLETDYHDLLDKREKERKANRQNWEAVEGIKDLKKGYLSQAVHQIAQLMLKYNAIIALEDLGQMFVTRGQKIEKAVYQQFEKSLVDKLSYLVDKKRPYNELGGILKAYQLASSITKNNSDKQNGFLFYVPAWNTSKIDPVTGFTDLLRPKAMTIKEAQDFFGAFDNISYNDKGYFEFETNYDKFKIRMKSAQTRWTICTFGNRIKRKKDKNYWNYEEVELTEEFKKLFKDSNIDYENCNLKEEIQNKDNRKFFDDLIKLLQLTLQMRNSDDKGNDYIISPVANAEGQFFDSRNGDKKLPLDADANGAYNIARKGLWNIRQIKQTKNDKKLNLSISSTEWLDFVREKPYLKKRPAATKKAGQAKKKKGSYPYDVPDYAYPYDVPDYAYPYDVPDYA

SEQ ID NO: 42 - protein, 1291 aa, Porphyromonas macacae
MKTQHFFEDFTSLYSLSKTIRFELKPIGKTLENIKKNGLIRRDEQRLDDYEKLKKVIDEYHEDFIANILSSFSFSEEILQSYIQNLSESEARAKIEKTMRDTLAKAFSEDERYKSIFKKELVKKDIPVWCPAYKSLCKKFDNFTTSLVPFHENRKNLYTSNEITASIPYRIVHVNLPKFIQNIEALCELQKKMGADLYLEMMENLRNVWPSFVKTPDDLCNLKTYNHLMVQSSISEYNRFVGGYSTEDGTKHQGINEWINIYRQRNKEMRLPGLVFLHKQILAKVDSSSFISDTLENDDQVFCVLRQFRKLFWNTVSSKEDDAASLKDLFCGLSGYDPEAIYVSDAHLATISKNIFDRWNYISDAIRRKTEVLMPRKKESVERYAEKISKQIKKRQSYSLAELDDLLAHYSEESLPAGFSLLSYFTSLGGQKYLVSDGEVILYEEGSNIWDEVLIAFRDLQVILDKDFTEKKLGKDEEAVSVIKKALDSALRLRKFFDLLSGTGAEIRRDSSFYALYTDRMDKLKGLLKMYDKVRNYLTKKPYSIEKFKLHFDNPSLLSGWDKNKELNNLSVIFRQNGYYYLGIMTPKGKNLFKTLPKLGAEEMFYEKMEYKQIAEPMLMLPKVFFPKKTKPAFAPDQSVVDIYNKKTFKTGQKGFNKKDLYRLIDFYKEALTVHEWKLFNFSFSPTEQYRNIGEFFDEVREQAYKVSMVNVPASYIDEAVENGKLYLFQIYNKDFSPYSKGIPNLHTLYWKALFSEQNQSRVYKLCGGGELFYRKASLHMQDTTVHPKGISIHKKNLNKKGETSLFNYDLVKDKRFTEDKFFFHVPISINYKNKKITNVNQMVRDYIAQNDDLQIIGIDRGERNLLYISRIDTRGNLLEQFSLNVIESDKGDLRTDYQKILGDREQERLRRRQEWKSIESIKDLKDGYMSQVVHKICNMVVEHKAIVVLENLNLSFMKGRKKVEKSVYEKFERMLVDKLNYLVVDKKNLSNEPGGLYAAYQLTNPLFSFEELHRYPQSGILFFVDPWNTSLTDPSTGFVNLLGRINYTNVGDARKFFDRFNAIRYDGKGNILFDLDLSRFDVRVETQRKLWTLTTFGSRIAKSKKSGKWMVERIENLSLCFLELFEQFNIGYRVEKDLKKAILSQDRKEFYVRLIYLFNLMMQIRNSDGEEDYILSPALNEKNLQFDSRLIEAKDLPVDADANGAYNVARKGLMVVQRIKRGDHESIHRIGRAQWLRYVQEGIVEKRPAATKKAGQAKKKKGSYPYDVPDYAYPYDVPDYAYPYDVPDYA

SEQ ID NO: 43 - protein, 1343 aa, Thiomicrospira sp.
MTKTFDSEFFNLYSLQKTVRFELKPVGETASFVEDFKNEGLKRVVSEDERRAVDYQKVKEIIDDYHRDFIEESLNYFPEQVSKDALEQAFHLYQKLKAAKVEEREKALKEWEALQKKLREKVVKCFSDSNKARFSRIDKKELIKEDLINWLVAQNREDDIPTVETFNNFTTYFTGFHENRKNIYSKDDHATAISFRLIHENLPKFFDNVISFNKLKEGFPELKFDKVKEDLEVDYDLKHAFEIEYFVNFVTQAGIDQYNYLLGGKTLEDGTKKQGMNEQINLFKQQQTRDKARQIPKLIPLFKQILSERTESQSFIPKQFESDQELFDSLQKLHNNCQDKFTVLQQAILGLAEADLKKVFIKTSDLNALSNTIFGNYSVFSDALNLYKESLKTKKAQEAFEKLPAHSIHDLIQYLEQFNSSLDAEKQQSTDTVLNYFIKTDELYSRFIKSTSEAFTQVQPLFELEALSSKRRPPESEDEGAKGQEGFEQIKRIKAYLDTLMEAVHFAKPLYLVKGRKMIEGLDKDQSFYEAFEMAYQELESLIIPIYNKARSYLSRKPFKADKFKINFDNNTLLSGWDANKETANASILFKKDGLYYLGIMPKGKTFLFDYFVSSEDSEKLKQRRQKTAEEALAQDGESYFEKIRYKLLPGASKMLPKVFFSNKNIGFYNPSDDILRIRNTASHTKNGTPQKGHSKVEFNLNDCHKMIDFFKSSIQKHPEWGSFGFTFSDTSDFEDMSAFYREVENQGYVISFDKIKETYIQSQVEQGNLYLFQIYNKDFSPYSKGKPNLHTLYWKALFEEANLNNVVAKLNGEAEIFFRRHSIKASDKVVHPANQAIDNKNPHTEKTQSTFEYDLVKDKRYTQDKFFFHVPISLNFKAQGVSKFNDKVNGFLKGNPDVNIIGIDRGERHLLYFTVVNQKGEILVQESLNTLMSDKGHVNDYQQKLDKKEQERDAARKSWTTVENIKELKEGYLSHVVHKLAHLIIKYNAIVCLEDLNFGFKRGRFKVEKQVYQKFEKALIDKLNYLVFKEKELGEVGHYLTAYQLTAPFESFKKLGKQSGILFYVPADYTSKIDPTTGFVNFLDLRYQSVEKAKQLLSDFNAIRFNSVQNYFEFEIDYKKLTPKRKVGTQSKWVICTYGDVRYQNRRNQKGHWETEEVNVTEKLKALFASDSKTTTVIDYANDDNLIDVILEQDKASFFKELLWLLKLTMTLRHSKIKSEDDFILSPVKNEQGEFYDSRKAGEVWPKDADANGAYHIALKGLWNLQQINQWEKGKTLNLAIKNQDWFSFIQEKPYQEKRPAATKKAGQAKKKKGSYPYDVPDYAYPYDVPDYAYPYDVPDYA

SEQ ID NO: 44 - protein, 1296 aa, Moraxella bovoculi
MLFQDFTHLYPLSKTVRFELKPIGRTLEHIHAKNFLSQDETMADMYQKVKVILDDYHRDFIADMMGEVKLTKLAEFYDVYLKFRKNPKDDGLQKQLKDLQAVLRKESVKPIGSGGKYKTGYDRLFGAKLFKDGKELGDLAKFVIAQEGESSPKLAHLAHFEKFSTYFTGFHDNRKNMYSDEDKHTAIAYRLIHENLPRFIDNLQILTTIKQKHSALYDQIINELTASGLDVSLASHLDGYHKLLTQEGITAYNRIIGEVNGYTNKHNQICHKSERIAKLRPLHKQILSDGMGVSFLPSKFADDSEMCQAVNEFYRHYTDVFAKVQSLFDGFDDHQKDGIYVEHKNLNELSKQAFGDFALLGRVLDGYYVDVVNPEFNERFAKAKTDNAKAKLTKEKDKFIKGVHSLASLEQAIEHHTARHDDESVQAGKLGQYFKHGLAGVDNPIQKIHNNHSTIKGFLERERPAGERALPKIKSGKNPEMTQLRQLKELLDNALNVAHFAKLLTTKTTLDNQDGNFYGEFGVLYDELAKIPTLYNKVRDYLSQKPFSTEKYKLNFGNPTLLNGWDLNKEKDNFGVILQKDGCYYLALLDKAHKKVFDNAPNTGKNVYQKMVYKLLPGPNKMLPKVFFAKSNLDYYNPSAELLDKYAKGTHKKGDNFNLKDCHALIDFFKAGINKHPEWQHFGFKFSPTSSYRDLSDFYREVEPQGYQVKFVDINADYIDELVEQGKLYLFQIYNKDFSPKAHGKPNLHTLYFKALFSEDNLADPIYKLNGEAQIFYRKASLDMNETTIHRAGEVLENKNPDNPKKRQFVYDIIKDKRYTQDKFMLHVPITMNFGVQGMTIKEFNKKVNQSIQQYDEVNVIGIDRGERHLLYLTVINSKGEILEQRSLNDITTASANGTQVTTPYHKILDKREIERLNARVGWGEIETIKELKSGYLSHVVHQINQLMLKYNAIVVLEDLNFGFKRGRFKVEKQIYQNFENALIKKLNHLVLKDKADDEIGSYKNALQLTNNFTDLKSIGKQTGFLFYVPAWNTSKIDPETGFVDLLKPRYENIAQSQAFFGKFDKICYNTDKGYFEFHIDYAKFTDKAKNSRQKWAICSHGDKRYVYDKTANQNKGAAKGINVNDELKSLFARYHINDKQPNLVMDICQNNDKEFHKSLMCLLKTLLALRYSNASSDEDFILSPVANDEGVFFNSALADDTQPQNADANGAYHIALKGLWLLNELKNSDDLNKVKLAIDNQTWLNFAQNRKRPAATKKAGQAKKKKGSYPYDVPDYAYPYDVPDYAYPYDVPDYA

SEQ ID NO: 45 - protein, 1306 aa, Moraxella bovoculi
MLFQDFTHLYPLSKTVRFELKPIGKTLEHIHAKNFLNQDETMADMYQKVKAILDDYHRDFIADMMGEVKLTKLAEFYDVYLKFRKNPKDDGLQKQLKDLQAVLRKEIVKPIGNGGKYKAGYDRLFGAKLFKDGKELGDLAKFVIAQEGESSPKLAHLAHFEKFSTYFTGFHDNRKNMYSDEDKHTAIAYRLIHENLPRFIDNLQILATIKQKHSALYDQIINELTASGLDVSLASHLDGYHKLLTQEGITAYNTLLGGISGEAGSRKIQGINELINSHHNQHCHKSERIAKLRPLHKQILSDGMGVSFLPSKFADDSEVCQAVNEFYRHYADVFAKVQSLFDGFDDYQKDGIYVEYKNLNELSKQAFGDFALLGRVLDGYYVDVVNPEFNERFAKAKTDNAKAKLTKEKDKFIKGVHSLASLEQAIEHYTARHDDESVQAGKLGQYFKHGLAGVDNPIQKIHNNHSTIKGFLERERPAGERALPKIKSDKSPEIRQLKELLDNALNVAHFAKLLTTKTTLHNQDGNFYGEFGALYDELAKIATLYNKVRDYLSQKPFSTEKYKLNFGNPTLLNGWDLNKEKDNFGVILQKDGCYYLALLDKAHKKVFDNAPNTGKSVYQKMIYKLLPGPNKMLPKVFFAKSNLDYYNPSAELLDKYAQGTHKKGDNFNLKDCHALIDFFKAGINKHPEWQHFGFKFSPTSSYQDLSDFYREVEPQGYQVKFVDINADYINELVEQGQLYLFQIYNKDFSPKAHGKPNLHTLYFKALFSEDNLVNPIYKLNGEAEIFYRKASLDMNETTIHRAGEVLENKNPDNPKKRQFVYDIIKDKRYTQDKFMLHVPITMNFGVQGMTIKEFNKKVNQSIQQYDEVNVIGIDRGERHLLYLTVINSKGEILEQRSLNDITTASANGTQMTTPYHKILDKREIERLNARVGWGEIETIKELKSGYLSHVVHQISQLMLKYNAIVVLEDLNFGFKRGRFKVEKQIYQNFENALIKKLNHLVLKDKADDEIGSYKNALQLTNNFTDLKSIGKQTGFLFYVPAWNTSKIDPETGFVDLLKPRYENIAQSQAFFGKFDKICYNADRGYFEFHIDYAKFNDKAKNSRQIWKICSHGDKRYVYDKTANQNKGATIGVNVNDELKSLFTRYHINDKQPNLVMDICQNNDKEFHKSLMYLLKTLLALRYSNASSDEDFILSPVANDEGVFFNSALADDTQPQNADANGAYHIALKGLWLLNELKNSDDLNKVKLAIDNQTWLNFAQNRKRPAATKKAGQAKKKKGSYPYDVPDYAYPYDVPDYAYPYDVPDYA

SEQ ID NO: 46 - protein, 1251 aa, Butyrivibrio sp.
MYYQNLTKKYPVSKTIRNELIPIGKTLENIRKNNILESDVKRKQDYEHVKGIMDEYHKQLINEALDNYMLPSLNQAAEIYLKKHVDVEDREEFKKTQDLLRREVTGRLKEHENYTKIGKKDILDLLEKLPSISEEDYNALESFRNFYTYFTSYNKVRENLYSDEEKSSTVAYRLINENLPKFLDNIKSYAFVKAAGVLADCIEEEEQDALFMVETFNMTLTQEGIDMYNYQIGKVNSAINLYNQKNHKVEEFKKIPKMKVLYKQILSDREEVFIGEFKDDETLLSSIGAYGNVLMTYLKSEKINIFFDALRESEGKNVYVKNDLSKTTMSNIVFGSWSAFDELLNQEYDLANENKKKDDKYFEKRQKELKKNKSYTLEQMSNLSKEDISPIENYIERISEDIEKICIYNGEFEKIVVNEHDSSRKLSKNIKAVKVIKDYLDSIKELEHDIKLINGSGQELEKNLVVYVGQEEALEQLRPVDSLYNLTRNYLTKKPFSTEKVKLNFNKSTLLNGWDKNKETDNLGILFFKDGKYYLGIMNTTANKAFVNPPAAKTENVFKKVDYKLLPGSNKMLPKVFFAKSNIGYYNPSTELYSNYKKGTHKKGPSFSIDDCHNLIDFFKESIKKHEDWSKFGFEFSDTADYRDISEFYREVEKQGYKLTFTDIDESYINDLIEKNELYLFQIYNKDFSEYSKGKLNLHTLYFMMLFDQRNLDNVVYKLNGEAEVFYRPASIAENELVIHKAGEGIKNKNPNRAKVKETSTFSYDIVKDKRYSKYKFTLHIPITMNFGVDEVRRFNDVINNALRTDDNVNVIGIDRGERNLLYVVVINSEGKILEQISLNSIINKEYDIETNYHALLDEREDDRNKARKDWNTIENIKELKTGYLSQVVNVVAKLVLKYNAIICLEDLNFGFKRGRQKVEKQVYQKFEKMLIEKLNYLVIDKSREQVSPEKMGGALNALQLTSKFKSFAELGKQSGIIYYVPAYLTSKIDPTTGFVNLFYIKYENIEKAKQFFDGFDFIRFNKKDDMFEFSFDYKSFTQKACGIRSKWIVYTNGERIIKYPNPEKNNLFDEKVINVTDEIKGLFKQYRIPYENGEDIKEIIISKAEADFYKRLFRLLHQTLQMRNSTSDGTRDYIISPVKNDRGEFFCSEFSEGTMPKDADANGAYNIARKGLWVLEQIRQKDEGEKVNLSMTNAEWLKYAQLHLLKRPAATKKAGQAKKKKGSYPYDVPDYAYPYDVPDYAYPYDVPDYA

SEQ ID NO: 47 - protein, 1262 aa, Eubacterium rectale
MNNGTNNFQNFIGISSLQKTLRNALIPTETTQQFIVKNGIIKEDELRGENRQILKDIMDDYYRGFISETLSSIDDIDWTSLFEKMEIQLKNGDNKDTLIKEQTEYRKAIHKKFANDDRFKNMFSAKLISDILPEFVIHNNNYSASEKEEKTQVIKLFSRFATSFKDYFKNRANCFSADDISSSSCHRIVNDNAEIFFSNALVYRRIVKSLSNDDINKISGDMKDSLKEMSLEEIYSYEKYGEFITQEGISFYNDICGKVNSFMNLYCQKNKENKNLYKLQKLHKQILCIADTSYEVPYKFESDEEVYQSVNGFLDNISSKHIVERLRKIGDNYNGYNLDKIYIVSKFYESVSQKTYRDWETINTALEIHYNNILPGNGKSKADKVKKAVKNDLQKSITEINELVSNYKLCSDDNIKAETYIHEISHILNNFEAQELKYNPEIHLVESELKASELKNVLDVIMNAFHWCSVFMTEELVDKDNNFYAELEEIYDEIYPVISLYNLVRNYVTQKPYSTKKIKLNFGIPTLADGWSKSKEYSNNAIILMRDNLYYLGIFNAKNKPDKKIIEGNTSENKGDYKKMIYNLLPGPNKMIPKVFLSSKTGVETYKPSAYILEGYKQNKHIKSSKDFDITFCHDLIDYFKNCIAIHPEWKNFGFDFSDTSTYEDISGFYREVELQGYKIDWTYISEKDIDLLQEKGQLYLFQIYNKDFSKKSTGNDNLHTMYLKNLFSEENLKDIVLKLNGEAEIFFRKSSIKNPIIHKKGSILVNRTYEAEEKDQFGNQIVRKNIPENIYQELYKYFNDKSDKELSDEAAKLKNVVGHHEAATNIVKDYRYTYDKYFLHMPITINFKANKTGFINDRILQYIAKEKDLHVIGIDRGERNLIYVSVIDTCGNIVEQKSFNIVNGYDYQIKLKQQEGARQIARKEWKEIGKIKEIKEGYLSLVIHEISKMVIKYNAIIAMEDLSYGFKKGRFKVERQVYQKFETMLINKLNYLVFKDISITENGGLLKGYQLTYIPDKLKNVGHQCGCIFYVPAAYTSKIDPTTGFVNIFKFKDLTVDAKREFIKKFDSIRYDSEKNLFCFTFDYNNFITQNTVMSKSSWSVYTYGVRIKRRFVNGRFSNESDTIDITKDMEKTLEMTDINWRDGHDLRQDIIDYEIVQHIFEIFRLTVQMRNSLSELEDRDYDRLISPVLNENNIFYDSAKAGDALPKDADANGAYCIALKGLYEIKQITENWKEDGKFSRDKLKISNKDWFDFIQNKRYL

SEQ ID NO: 48 - protein, 1263 aa, Eubacterium rectale
MNNGTNNFQNFIGISSLQKTLRNALIPTETTQQFIVKNGIIKEDELRGENRQILKDIMDDYYRGFISETLSSIDDIDWTSLFEKMEIQLKNGDNKDTLIKEQAEKRKAIYKKFADDDRFKNMFSAKLISDILPEFVIHNNNYSASEKEEKTQVIKLFSRFATSFKDYFKNRANCFSADDISSSSCHRIVNDNAEIFFSNALVYRRIVKNLSNDDINKISGDMKDSLKEMSLDEIYSYEKYGEFITQEGISFYNDICGKVNSFMNLYCQKNKENKNLYKLRKLHKQILCIADTSYEVPYKFESDEEVYQSVNGFLDNISSKHIVERLRKIGDNYNGYNLDKIYIVSRFYESVSQKTYRDWETINTALEIHYNNILPGNGKSKADKVKKAVKNDLQKSITEINELVSNYKLCPDDNIKAETYIHEISHILNNFEAQELKYNPEIHLVESELKASELKNVLDVIMNAFHWCSVFMTEELVDKDNNFYAELEEIYDEIYPVISLYNLVRNYVTQKPYSTKKIKLNFGIPTLADGWSKSKEYSNNAIILMRDNLYYLGIFNAKNKPDKKIIEGNTSENKGDYKKMIYNLLPGPNKMIPKVFLSSKTGVETYKPSAYILEGYKQNKHLKSSKDFDITFCRDLIDYFKNCIAIHPEWKNFGFDFSDTSTYEDISGFYREVELQGYKIDWTYISEKDIDLLQEKGQLYLFQIYNKDFSKKSTGNDNLHTMYLKNLFSEENLKDIVLKLNGEAEIFFRKSSIKNPIIHKKGSILVNRTYEAEEKDQFGNIQIVRKTIPENIYQELYKYFNDKSDKELSDEAAKLKNVVGHHEAATNIVKDYRYTYDKYFLHMPITINFKANKTSFINDRILQYIAKENDLHVIGIDRGERNLIYVSVIDTCGNIVEQKSFNIVNGYDYQIKLKQQEGARQIARKEWKEIGKIKEIKEGYLSLVIHEISKMVIKYNAIIAMEDLSYGFKKGRFKVERQVYQKFETMLINKLNYLVFKDISITENGGLLKGYQLTYIPEKLKNVGHQCGCIFYVPAAYTSKIDPTTGFANIFKFKDLTVDAKREFIKKFDSIRYDSEKNLFCFTFDYNNFITQNTVMSKSSWSVYTYGVRIKRRFVNGRFSNESDTIDITKDMEKTLEMTDINWRDGHDLRQDIIDYEIVQHIFEIFKLTVQMRNSLSELEDRDYDRLISPVLNENNIFYDSAKAGDALPKDADANGAYCIALKGLYEIKQITENWKEDGKFSRDKLKISNKDWFDFIQNKRYL

SEQ ID NO: 49 - protein, 1263 aa, Eubacterium rectale
MNNGTNNFQNFIGISSLQKTLRNALTPTETTQQFIVKNGIIKEDELRGENRQILKDIMDDYYRGFISETLSSIDDIDWTSLFEKMEIQLKNGDNKDTLIKEQAEKRKAIYKKFADDDRFKNMFSAKLISDILPEFVIHNNNYSASEKEEKTQVIKLFSRFATSFKDYFKNRANCFSADDISSSSCHRIVNDNAEIFFSNALVYRRIVKNLSNDDINKISGDMKDSLKKMSLEKIYSYEKYGEFITQEGISFYNDICGKVNSFMNLYCQKNKENKNLYKLRKLHKQILCIADTSYEVPYKFESDEEVYQSVNGFLDNISSKHIVERLRKIGDNYNGYNLDKIYIVSKFYESVSQKTYRDWETINTALEIHYNNILPGNGKSKADKVKKAVKNDLQKSITEINELVSNYKLCPDDNIKAETYIHEISHILNNFEAQELKYNPEIHLVESELKASELKNVLDVIMNAFHWCSVFMTEELVDKDNNFYAELEEIYDEIYPVISLYNLVRNYVTQKPYSTKKIKLNFGIPTLADGWSKSKEYSNNAIILMRDNLYYLGIFNAKNKPEKKIIEGNTSENKGDYKKMIYNLLPGPNKMIPKVFLSSKTGVETYKPSAYILEGYKQNKHLKSSKDFDITFCRDLIDYFKNCIAIHPEWKNFGFDFSDTSTYEDISGFYREVELQGYKIDWTYISEKDIDLLQEKGQLYLFQIYNKDFSKKSTGNDNLHTMYLKNLFSEENLKDVVLKLNGEAEIFFRKSSIKNPIIHKKGSILVNRTYEAEEKDQFGNIQIVRKTIPENIYQELYKYFNDKSDKELSDEAAKLKNAVGHHEAATNIVKDYRYTYDKYFLHMPITINFKANKTSFINDRILQYIAKEKDLHVIGIDRGERNLIYVSVIDTCGNIVEQKSFNIVNGYDYQIKLKQQEGARQIARKEWKEIGKIKEIKEGYLSLVIHEISKMVIKYNAIIAMEDLSYGFKKGRFKVERQVYQKFETMLINKLNYLVFKDISITENGGLLKGYQLTYIPEKLKNVGHQCGCIFYVPAAYTSKIDPTTGFVNIFKFKDLTVDAKREFIKKFDSIRYDSDKNLFCFTFDYNNFITQNTVMSKSSWSVYTYGVRIKRRFVNGRFSNESDTIDITKDMEKTLEMTDINWRDGHDLRQDIIDYEIVQHIFEIFKLTVQMRNSLSELEDRNYDRLISPVLNENNIFYDSAKAGDALPKDADANGAYCIALKGLYEIKQITENWKEDGKFSRDKLKISNKDWFDFIQNKRYL

SEQ ID NO: 50 - protein, 1263 aa, Eubacterium sp.
MNNGTNNFQNFIGISSLQKTLRNALIPTETTQQFIVKNGIIKEDELRGKNRQILKDIMDDYYRGFISETLSSIDDIDWTSLFEKMEIQLKNGDNKDTLIKEQAEKRKAIYKKFADDDRFKNMFSAKLISDILPEFVIHNNNYSASEKKEKTQVIKLFSRFATSFKDYFKNRANCFSADDISSSSCHRIVNDNAEIFFSNALVYRRIVKNLSNDDINKISGDMKDSLKEMSLEEIYSYEKYGEFITQEGISFYNDICGKVNSFMNLYCQKNKENKNLYKLRKLHKQILCIADTSYEVPYKFESDEEVYQSVNGFLDNISSKHIVERLRKIGDNYNDYNLDKIYIVSKFYESVSQKTYRDWETINTALEIHYNNILPGNGKSKADKVKKAVKNDLQKSITEINELVSNYKLCSDDNIKAETYIHEISHILNNFEAHELKYNPEIHLVESELKASELKNVLDIIMNAFHWCSVFMTEELVDKDNNFYAELEEIYDEIYPVISLYNLVRNYVTQKPYSTKKIKLNFGIPTLADGWSKSKEYSNNAIILMRDNLYYLGIFNAKNKPDKKIIEGNTSENKGDYKKMIYNLLPGPNKMIPKVFLSSKTGVETYKPSAYILEGYKQNKHLKSSKDFDITFCHDLIDYFKNCIAIHPEWKNFGFDFSDTSAYEDISGFYREVELQGYKIDWTYISEKDIDLLQEKGQLYLFQIYNKDFSKKSTGNDNLHTMYLKNLFSEENLKDIVLKLNGEAEIFFRKSSIKNPIIHKKGSILVNRTYEAEEKDQFGNIQIVRKTIPENIYQELYKYFNDKSDKELSDEAAKLKNVVGHHEAATNIVKDYRYTYDKYFLHMPITINFKANKTSFINDRILQYIAKEKDLHVIGIDRGERNLIYVSVIDTCGNIVEQKSFNIVNGYDYQIKLKQQEGARQIARKEWKEIGKIKEIKEGYLSLVIHEISKMVIKYNAIIAMEDLSYGFKKGRFKVERQVYQKFETMLINKLNYLVFKDISITENGGLLKGYQLTYIPDKLKNVGHQCGCIFYVPAAYTSKIDPTTGFVNIFKFKDLTVDAKREFIKKFDSIRYDSEKNLFCFTFDYNNFITQNTVMSKSSWSVYTYGVRIKRRFVNGRFSNESDTIDITKDMEKTLEMTDINWRDGHDLRQDIIDYEIVQHIFEIFKLTVQMRNSLSELEDRDYDRLISPVLNENNIFYDSAKAGYALPKDADANGAYCIALKGLYEIKQITENWKEDGKFSRDKLKISNKDWFDFIQNKRYL

SEQ ID NO: 51 - protein, 1340 aa, other
MQISKVNHKHVAVGQKDRERITGFIYNDPVGDEKSLEDVVAKRANDTKVLFNVFNTKDLYDSQESDKSEKDKEIISKGAKFVAKSFNSAITILKKQNKIYSTLTSQQVIKELKDKFGGARIYDDDIEEALTETLKKSFRKENVRNSIKVLIENAAGIRSSLSKDEEELIQEYFVKQLVEEYTKTKLQKNVVKSIKNQNMVIQPDSDSQVLSLSESRREKQSSAVSSDTLVNCKEKDVLKAFLTDYAVLDEDERNSLLWKLRNLVNLYFYGSESIRDYSYTKEKSVWKEHDEQKANKTLFIDEICHITKIGKNGKEQKVLDYEENRSRCRKQNINYYRSALNYAKNNTSGIFENEDSNHFWIHLIENEVERLYNGIENGEEFKFETGYISEKVWKAVINHLSIKYIALGKAVYNYAMKELSSPGDIEPGKIDDSYINGITSFDYEIIKAEESLQRDISMNVVFATNYLACATVDTDKDFLLFSKEDIRSCTKKDGNLCKNIMQFWGGYSTWKNFCEEYLKDDKDALELLYSLKSMLYSMRNSSFHFSTENVDNGSWDTELIGKLFEEDCNRAARIEKEKFYNNNLHMFYSSSLLEKVLERLYSSHHERASQVPSFNRVFVRKNFPSSLSEQRITPKFTDSKDEQIWQSAVYYLCKEIYYNDFLQSKEAYKLFREGVKNLDKNDINNQKAADSFKQAVVYYGKAIGNATLSQVCQAIMTEYNRQNNDGLKKKSAYAEKQNSNKYKHYPLFLKQVLQSAFWEYLDENKEIYGFISAQIHKSNVEIKAEDFIANYSSQQYKKLVDKVKKTPELQKWYTLGRLINPRQANQFLGSIRNYVQFVKDIQRRAKENGNPIRNYYEVLESDSIIKILEMCTKLNGTTSNDIHDYFRDEDEYAEYISQFVNFGDVHSGAALNAFCNSESEGKKNGIYYDGINPIVNRNWVLCKLYGSPDLISKIISRVNENMIHDFHKQEDLIREYQIKGICSNKKEQQDLRTFQVLKNRVELRDIVEYSEIINELYGQLIKWCYLRERDLMYFQLGFHYLCLNNASSKEADYIKINVDDRNISGAILYQIAAMYINGLPVYYKKDDMYVALKSGKKASDELNSNEQTSKKINYFLKYGNNILGDKKDQLYLAGLELFENVAEHENIIIFRNEIDHFHYFYDRDRSMLDLYSEVFDRFFTYDMKLRKNVVNMLYNILLDHNIVSSFVFETGEKKVGRGDSEVIKPSAKIRLRANNGVSSDVFTYKVGSKDELKIATLPAKNEEFLLNVARLIYYPDMEAVSENMVREGVVKVEKSNDKKGKISRGSNTRSSNQSKYNNKSKNRMNYSMGSIFEKMDLKFD

SEQ ID NO: 52 - protein, 1437 aa, other
MKISKVREENRGAKLTVNAKTAVVSENRSQEGILYNDPSRYGKSRKNDEDRDRYIESRLKSSGKLYRIFNEDKNKRETDELQWFLSEIVKKINRRNGLVLSDMLSVDDRAFEKAFEKYAELSYTNRRNKVSGSPAFETCGVDAATAERLKGIISETNFINRIKNNIDNKVSEDIIDRIIAKYLKKSLCRERVKRGLKKLLMNAFDLPYSDPDIDVQRDFIDYVLEDFYHVRAKSQVSRSIKNMNMPVQPEGDGKFAITVSKGGTESGNKRSAEKEAFKKFLSDYASLDERVRDDMLRRMRRLVVLYFYGSDDSKLSDVNEKFDVWEDHAARRVDNREFIKLPLENKLANGKTDKDAERIRKNTVKELYRNQNIGCYRQAVKAVEEDNNGRYFDDKMLNMFFIHRIEYGVEKIYANLKQVTEFKARTGYLSEKIWKDLINYISIKYIAMGKAVYNYAMDELNASDKKEIELGKISEEYLSGISSFDYELIKAEEMLQRETAVYVAFAARHLSSQTVELDSENSDFLLLKPKGTMDKNDKNKLASNNILNFLKDKETLRDTILQYFGGHSLWTDFPFDKYLAGGKDDVDFLTDLKDVIYSMRNDSFHYATENHNNGKWNKELISAMFEHETERMTVVMKDKFYSNNLPMFYKNDDLKKLLIDLYKDNVERASQVPSFNKVFVRKNFPALVRDKDNLGIELDLKADADKGENELKFYNALYYMFKEIYYNAFLNDKNVRERFITKATKVADNYDRNKERNLKDRIKSAGSDEKKKLREQLQNYIAENDFGQRIKNIVQVNPDYTLAQICQLIMTEYNQQNNGCMQKKSAARKDINKDSYQHYKMLLLVNLRKAFLEFIKENYAFVLKPYKHDLCDKADFVPDFAKYVKPYAGLISRVAGSSELQKWYIVSRFLSPAQANHMLGFLHSYKQYVWDIYRRASETGTEINHSIAEDKIAGVDITDVDAVIDLSVKLCGTISSEISDYFKDDEVYAEYISSYLDFEYDGGNYKDSLNRFCNSDAVNDQKVALYYDGEHPKLNRNIILSKLYGERRFLEKITDRVSRSDIVEYYKLKKETSQYQTKGIFDSEDEQKNIKKFQEMKNIVEFRDLMDYSEIADELQGQLINWIYLRERDLMNFQLGYHYACLNNDSNKQATYVTLDYQGKKNRKINGAILYQICAMYINGLPLYYVDKDSSEWTVSDGKESTGAKIGEFYRYAKSFENTSDCYASGLEIFENISEHDNITELRNYIEHFRYYSSFDRSFLGIYSEVFDRFFTYDLKYRKNVPTILYNILLQHFVNVRFEFVSGKKMIGIDKKDRKIAKEKECARITIREKNGVYSEQFTYKLKNGTVYVDARDKRYLQSIIRLLFYPEKVNMDEMIEVKEKKKPSDNNTGKGYSKRDRQQDRKEYDKYKEKKKKEGNFLSGMGGNINWDEINAQLKN

SEQ ID NO: 53 - protein, 1385 aa, Clostridium aminophilum
MKFSKVDHTRSAVGIQKATDSVHGMLYTDPKKQEVNDLDKRFDQLNVKAKRLYNVFNQSKAEEDDDEKRFGKVVKKLNRELKDLLFHREVSRYNSIGNAKYNYYGIKSNPEEIVSNLGMVESLKGERDPQKVISKLLLYYLRKGLKPGTDGLRMILEASCGLRKLSGDEKELKVFLQTLDEDFEKKTFKKNLIRSIENQNMAVQPSNEGDPIIGITQGRFNSQKNEEKSAIERMMSMYADLNEDHREDVLRKLRRLNVLYFNVDTEKTEEPTLPGEVDTNPVFEVWHDHEKGKENDRQFATFAKILTEDRETRKKEKLAVKEALNDLKSAIRDHNIMAYRCSIKVTEQDKDGLFFEDQRINRFWIHHIESAVERILASINPEKLYKLRIGYLGEKVWKDLLNYLSIKYIAVGKAVFHFAMEDLGKTGQDIELGKLSNSVSGGLTSFDYEQIRADETLQRQLSVEVAFAANNLFRAVVGQTGKKIEQSKSEENEEDFLLWKAEKIAESIKKEGEGNTLKSILQFFGGASSWDLNHFCAAYGNESSALGYETKFADDLRKAIYSLRNETFHFTTLNKGSFDWNAKLIGDMFSHEAATGIAVERTRFYSNNLPMFYRESDLKRIMDHLYNTYHPRASQVPSFNSVFVRKNFRLFLSNTLNTNTSFDTEVYQKWESGVYYLFKEIYYNSFLPSGDAHHLFFEGLRRIRKEADNLPIVGKEAKKRNAVQDFGRRCDELKNLSLSAICQMIMTEYNEQNNGNRKVKSTREDKRKPDIFQHYKMLLLRTLQEAFAIYIRREEFKFIFDLPKTLYVMKPVEEFLPNWKSGMFDSLVERVKQSPDLQRWYVLCKFLNGRLLNQLSGVIRSYIQFAGDIQRRAKANHNRLYMDNTQRVEYYSNVLEVVDFCIKGTSRFSNVFSDYFRDEDAYADYLDNYLQFKDEKIAEVSSFAALKTFCNEEEVKAGIYMDGENPVMQRNIVMAKLFGPDEVLKNVVPKVTREEIEEYYQLEKQIAPYRQNGYCKSEEDQKKLLRFQRIKNRVEFQTITEFSEIINELLGQLISWSFLRERDLLYFQLGFHYLCLHNDTEKPAEYKEISREDGTVIRNAILHQVAAMYVGGLPVYTLADKKLAAFEKGEADCKLSISKDTAGAGKKIKDFFRYSKYVLIKDRMLTDQNQKYTIYLAGLELFENTDEHDNITDVRKYVDHFKYYATSDENAMSILDLYSEIHDRFFTYDMKYQKNVANMLENILLRHFVLIRPEFFTGSKKVGEGKKITCKARAQIEIAENGMRSEDFTYKLSDGKKNISTCMIAARDQKYLNTVARLLYYPHEAKKSIVDTREKKNNKKTNRGDGTFNKQKGTARKEKDNGPREFNDTGFSNTPFAGFDPFRNS

SEQ ID NO: 54 - protein, 1175 aa, Carnobacterium gallinarum
MRITKVKIKLDNKLYQVTMQKEEKYGTLKLNEESRKSTAEILRLKKASFNKSFHSKTINSQKENKNATIKKNGDYISQIFEKLVGVDTNKNIRKPKMSLTDLKDLPKKDLALFIKRKFKNDDIVEIKNLDLISLFYNALQKVPGEHFTDESWADFCQEMMPYREYKNKFIERKIILLANSIEQNKGFSINPETFSKRKRVLHQWAIEVQERGDFSILDEKLSKLAEIYNFKKMCKRVQDELNDLEKSMKKGKNPEKEKEAYKKQKNFKIKTIWKDYPYKTHIGLIEKIKENEELNQFNIEIGKYFEHYFPIKKERCTEDEPYYLNSETIATTVNYQLKNALISYLMQIGKYKQFGLENQVLDSKKLQEIGIYEGFQTKFMDACVFATSSLKNIIEPMRSGDILGKREFKEAIATSSFVNYHHFFPYFPFELKGMKDRESELIPFGEQTEAKQMQNIWALRGSVQQIRNEIFHSFDKNQKFNLPQLDKSNFEFDASENSTGKSQSYIETDYKFLFEAEKNQLEQFFIERIKSSGALEYYPLKSLEKLFAKKEMKFSLGSQVVAFAPSYKKLVKKGHSYQTATEGTANYLGLSYYNRYELKEESFQAQYYLLKLIYQYVFLPNFSQGNSPAFRETVKAILRINKDEARKKMKKNKKFLRKYAFEQVREMEFKETPDQYMSYLQSEMREEKVRKAEKNDKGFEKNITMNFEKLLMQIFVKGFDVFLTTFAGKELLLSSEEKVIKETEISLSKKINEREKTLKASIQVEHQLVATNSAISYWLFCKLLDSRHLNELRNEMIKFKQSRIKFNHTQHAELIQNLLPIVELTILSNDYDEKNDSQNVDVSAYFEDKSLYETAPYVQTDDRTRVSFRPILKLEKYHTKSLIEALLKDNPQFRVAATDIQEWMHKREEIGELVEKRKNLHTEWAEGQQTLGAEKREEYRDYCKKIDRFNWKANKVTLTYLSQLHYLITDLLGRMVGFSALFERDLVYFSRSFSELGGETYHISDYKNLSGVLRLNAEVKPIKIKNIKVIDNEENPYKGNEPEVKPFLDRLHAYLENVIGIKAVHGKIRNQTAHLSVLQLELSMIESMNNLRDLMAYDRKLKNAVTKSMIKILDKHGMILKLKIDENHKNFEIESLIPKEIIHLKDKAIKTNQVSEEYCQLVLALLTTNPGNQLN

SEQ ID NO: 55 - protein, 1164 aa, Carnobacterium gallinarum
MRMTKVKINGSPVSMNRSKLNGHLVWNGTTNTVNILTKKEQSFAASFLNKTLVKADQVKGYKVLAENIFIIFEQLEKSNSEKPSVYLNNIRRLKEAGLKRFFKSKYHEEIKYTSEKNQSVPTKLNLIPLFFNAVDRIQEDKFDEKNWSYFCKEMSPYLDYKKSYLNRKKEILANSIQQNRGFSMPTAEEPNLLSKRKQLFQQWAMKFQESPLIQQNNFAVEQFNKEFANKINELAAVYNVDELCTAITEKLMNFDKDKSNKTRNFEIKKLWKQHPHNKDKALIKLFNQEGNEALNQFNIELGKYFEHYFPKTGKKESAESYYLNPQTIIKTVGYQLRNAFVQYLLQVGKLHQYNKGVLDSQTLQEIGMYEGFQTKFMDACVFASSSLRNIIQATTNEDILTREKFKKELEKNVELKHDLFFKTEIVEERDENPAKKIAMTPNELDLWAIRGAVQRVRNQIFHQQINKRHEPNQLKVGSFENGDLGNVSYQKTIYQKLFDAEIKDIEIYFAEKIKSSGALEQYSMKDLEKLFSNKELTLSLGGQVVAFAPSYKKLYKQGYFYQNEKTIELEQFTDYDFSNDVFKANYYLIKLIYHYVFLPQFSQANNKLFKDTVHYVIQQNKELNTTEKDKKNNKKIRKYAFEQVKLMKNESPEKYMQYLQREMQEERTIKEAKKTNEEKPNYNFEKLLIQIFIKGFDTFLRNFDLNLNPAEELVGTVKEKAEGLRKRKERIAKILNVDEQIKTGDEEIAFWIFAKLLDARHLSELRNEMIKFKQSSVKKGLIKNGDLIEQMQPILELCILSNDSESMEKESFDKIEVFLEKVELAKNEPYMQEDKLTPVKFRFMKQLEKYQTRNFIENLVIENPEFKVSEKIVLNWHEEKEKIADLVDKRTKLHEEWASKAREIEEYNEKIKKNKSKKLDKPAEFAKFAEYKIICEAIENFNRLDHKVRLTYLKNLHYLMIDLMGRMVGFSVLFERDFVYMGRSYSALKKQSIYLNDYDTFANIRDWEVNENKHLFGTSSSDLTFQETAEFKNLKKPMENQLKALLGVTNHSFEIRNNIAHLHVLRNDGKGEGVSLLSCMNDLRKLMSYDRKLKNAVTKAIIKILDKHGMILKLTNNDHTKPFEIESLKPKKIIHLEKSNHSFPMDQVSQEYCDLVKKMLVFTN

SEQ ID NO: 56 - protein, 1154 aa, Paludibactre propionicige
MRVSKVKVKDGGKDKMVLVHRKTTGAQLVYSGQPVSNETSNILPEKKRQSFDLSTLNKTIIKFDTAKKQKLNVDQYKIVEKIFKYPKQELPKQIKAEEILPFLNHKFQEPVKYWKNGKEESFNLTLLIVEAVQAQDKRKLQPYYDWKTWYIQTKSDLLKKSIENNRIDLTENLSKRKKALLAWETEFTASGSIDLTHYHKVYMTDVLCKMLQDVKPLTDDKGKINTNAYHRGLKKALQNHQPAIFGTREVPNEANRADNQLSIYHLEVVKYLEHYFPIKTSKRRNTADDIAHYLKAQTLKTTIEKQLVNAIRANIIQQGKTNHHELKADTTSNDLIRIKTNEAFVLNLTGTCAFAANNIRNMVDNEQTNDILGKGDFIKSLLKDNTNSQLYSFFFGEGLSTNKAEKETQLWGIRGAVQQIRNNVNHYKKDALKTVFNISNFENPTITDPKQQTNYADTIYKARFINELEKIPEAFAQQLKTGGAVSYYTIENLKSLLTTFQFSLCRSTIPFAPGFKKVFNGGINYQNAKQDESFYELMLEQYLRKENFAEESYNARYFMLKLIYNNLFLPGFTTDRKAFADSVGFVQMQNKKQAEKVNPRKKEAYAFEAVRPMTAADSIADYMAYVQSELMQEQNKKEEKVAEETRINFEKFVLQVFIKGFDSFLRAKEFDFVQMPQPQLTATASNQQKADKLNQLEASITADCKLTPQYAKADDATHIAFYVFCKLLDAAHLSNLRNELIKFRESVNEFKFHHLLEIIEICLLSADVVPTDYRDLYSSEADCLARLRPFIEQGADITNWSDLFVQSDKHSPVIHANIELSVKYGTTKLLEQIINKDTQFKTTEANFTAWNTAQKSIEQLIKQREDHHEQWVKAKNADDKEKQERKREKSNFAQKFIEKHGDDYLDICDYINTYNWLDNKMHFVHLNRLHGLTIELLGRMAGFVALFDRDFQFFDEQQIADEFKLHGFVNLHSIDKKLNEVPTKKIKEIYDIRNKIIQINGNKINESVRANLIQFISSKRNYYNNAFLHVSNDEIKEKQMYDIRNHIAHFNYLTKDAADFSLIDLINELRELLHYDRKLKNAVSKAFIDLFDKHGMILKLKLNADHKLKVESLEPKKIYHLGSSAKDKPEYQYCTNQVMMAYCNMCRSLLEMKK

SEQ ID NO: 57 - protein, 970 aa, Listeria weihenstephanensis
MLALLHQEVPSQKLHNLKSLNTESLTKLFKPKFQNMISYPPSKGAEHVQFCLTDIAVPAIRDLDEIKPDWGIFFEKLKPYTDWAESYIHYKQTTIQKSIEQNKIQSPDSPRKLVLQKYVTAFLNGEPLGLDLVAKKYKLADLAESFKVVDLNEDKSANYKIKACLQQHQRNILDELKEDPELNQYGIEVKKYIQRYFPIKRAPNRSKHARADFLKKELIESTVEQQFKNAVYHYVLEQGKMEAYELTDPKTKDLQDIRSGEAFSFKFINACAFASNNLKMILNPECEKDILGKGDFKKNLPNSTTQSDVVKKMIPFFSDEIQNVNFDEAIWAIRGSIQQIRNEVYHCKKHSWKSILKIKGFEFEPNNMKYTDSDMQKLMDKDIAKIPDFIEEKLKSSGIIRFYSHDKLQSIWEMKQGFSLLTTNAPFVPSFKRVYAKGHDYQTSKNRYYDLGLTTFDILEYGEEDFRARYFLTKLVYYQQFMPWFTADNNAFRDAANFVLRLNKNRQQDAKAFINIREVEEGEMPRDYMGYVQGQIAIHEDSTEDTPNHFEKFISQVFIKGFDSHMRSADLKFIKNPRNQGLEQSEIEEMSFDIKVEPSFLKNKDDYIAFWTFCKMLDARHLSELRNEMIKYDGHLTGEQEIIGLALLGVDSRENDWKQFFSSEREYEKIMKGYVGEELYQREPYRQSDGKTPILFRGVEQARKYGTETVIQRLFDASPEFKVSKCNITEWERQKETIEETIERRKELHNEWEKNPKKPQNNAFFKEYKECCDAIDAYNWHKNKTTLVYVNELHHLLIEILGRYVGYVAIADRDFQCMANQYFKHSGITERVEYWGDNRLKSIKKLDTFLKKEGLFVSEKNARNHIAHLNYLSLKSECTLLYLSERLREIFKYDRKLKNAVSKSLIDILDRHGMSVVFANLKENKHRLVIKSLEPKKLRHLGEKKIDNGYIETNQVSEEYCGIVKRLLEI

SEQ ID NO: 58 - protein, 1051 aa, Other
MKITKMRVDGRTIVMERTSKEGQLGYEGIDGNKTTEIIFDKKKESFYKSILNKTVRKPDEKEKNRRKQAINKAINKEITELMLAVLHQEVPSQKLHNLKSLNTESLTKLFKPKFQNMISYPPSKGAEHVQFCLTDIAVPAIRDLDEIKPDWGIFFEKLKPYTDWAESYIHYKQTTIQKSIEQNKIQSPDSPRKLVLQKYVTAFLNGEPLGLDLVAKKYKLADLAESFKLVDLNEDKSANYKIKACLQQHQRNILDELKEDPELNQYGIEVKKYIQRYFPIKRAPNRSKHARADFLKKELIESTVEQQFKNAVYHYVLEQGKMEAYELTDPKTKDLQDIRSGEAFSFKFINACAFASNNLKMILNPECEKDILGKGNFKKNLPNSTTRSDVVKKMIPFFSDELQNVNFDEAIWAIRGSIQQIRNEVYHCKKHSWKSILKIKGFEFEPNNMKYADSDMQKLMDKDIAKIPEFIEEKLKSSGVVRFYRHDELQSIWEMKQGFSLLTTNAPFVPSFKRVYAKGHDYQTSKNRYYNLDLTTFDILEYGEEDFRARYFLTKLVYYQQFMPWFTADNNAFRDAANFVLRLNKNRQQDAKAFINIREVEEGEMPRDYMGYVQGQIAIHEDSIEDTPNHFEKFISQVFIKGFDRHMRSANLKFIKNPRNQGLEQSEIEEMSFDIKVEPSFLKNKDDYIAFWIFCKMLDARHLSELRNEMIKYDGHLTGEQEIIGLALLGVDSRENDWKQFFSSEREYEKIMKGYVVEELYQREPYRQSDGKTPILFRGVEQARKYGTETVIQRLFDANPEFKVSKCNLAEWERQKETIEETIKRRKELHNEWAKNPKKPQNNAFFKEYKECCDAIDAYNWHKNKTTLAYVNELHHLLIEILGRYVGYVAIADRDFQCMANQYFKHSGITERVEYWGDNRLKSIKKLDTFLKKEGLFVSEKNARNHIAHLNYLSLKSECTLLYLSERLREIFKYDRKLKNAVSKSLIDILDRHGMSVVFANLKENKHRLVIKSLEPKKLRHLGGKKIDGGYIETNQVSEEYCGIVKRLLEM

SEQ ID NO: 59 - protein, 1152 aa, Leptotrichia wadei
MKVTKVDGISHKKYIEEGKLVKSTSEENRTSERLSELLSIRLDIYIKNPDNASEEENRIRRENLKKFFSNKVLHLKDSVLYLKNRKEKNAVQDKNYSEEDISEYDLKNKNSFSVLKKILLNEDVNSEELEIFRKDVEAKLNKINSLKYSFEENKANYQKINENNVEKVGGKSKRNIIYDYYRESAKRNDYINNVQEAFDKLYKKEDIEKLFFLIENSKKHEKYKIREYYHKIIGRKNDKENFAKIIYEEIQNVNNIKELIEKIPDMSELKKSQVFYKYYLDKEELNDKNIKYAFCHFVEIEMSQLLKNYVYKRLSNISNDKIKRIFEYQNLKKLIENKLLNKLDTYVRNCGKYNYYLQVGEIATSDFIARNRQNEAFLRNIIGVSSVAYFSLRNILETENENDITGRMRGKTVKNNKGEEKYVSGEVDKIYNENKQNEVKENLKMFYSYDFNMDNKNEIEDFFANIDEAISSIRHGIVHFNLELEGKDIFAFKNIAPSEISKKMFQNEINEKKLKLKIFKQLNSANVFNYYEKDVIIKYLKNTKFNFVNKNIPFVPSFTKLYNKIEDLRNTLKFFWSVPKDKEEKDAQIYLLKNIYYGEFLNKFVKNSKVFFKITNEVIKINKQRNQKTGHYKYQKFENIEKTVPVEYLAIIQSREMINNQDKEEKNTYIDFIQQIFLKGFIDYLNKNNLKYIESNNNNDNNDIFSKIKIKKDNKEKYDKILKNYEKHNRNKEIPHEINEFVREIKLGKILKYTENLNMFYLILKLLNHKELTNLKGSLEKYQSANKEETFSDELELINLLNLDNNRVTEDFELEANEIGKFLDFNENKIKDRKELKKFDTNKIYFDGENIIKHRAFYNIKKYGMLNLLEKIADKAKYKISLKELKEYSNKKNEIEKNYTMQQNLHRKYARPKKDEKFNDEDYKEYEKAIGNIQKYTHLKNKVEFNELNLLQGLLLKILHRLVGYTSIWERDLRFRLKGEFPENHYIEEIFNFDNSKNVKYKSGQIVEKYINFYKELYKDNVEKRSIYSDKKVKKLKQEKKDLYIRNYIAHFNYIPHAEISLLEVLENLRKLLSYDRKLKNAIMKSIVDILKEYGFVATFKIGADKKIEIQTLESEKIVHLKNLKKKKLMTDRNSEELCELVKVMFEYKALE

SEQ ID NO: 60 - protein, 1285 aa, Rhodobacter capsulatus
MQIGKVQGRTISEFGDPAGGLKRKISTDGKNRKELPAHLSSDPKALIGQWISGIDKIYRKPDSRKSDGKAIHSPTPSKMQFDARDDLGEAFWKLVSEAGLAQDSDYDQFKRRLHPYGDKFQPADSGAKLKFEADPPEPQAFHGRWYGAMSKRGNDAKELAAALYEHLHVDEKRIDGQPKRNPKTDKFAPGLVVARALGIESSVLPRGMARLARNWGEEEIQTYFVVDVAASVKEVAKAAVSAAQAFDPPRQVSGRSLSPKVGFALAEHLERVTGSKRCSFDPAAGPSVLALHDEVKKTYKRLCARGKNAARAFPADKTELLALMRHTHENRVRNQMVRMGRVSEYRGQQAGDLAQSHYWTSAGQTEIKESEIFVRLWVGAFALAGRSMKAWIDPMGKIVNTEKNDRDLTAAVNIRQVISNKEMVAEAMARRGIYFGETPELDRLGAEGNEGFVFALLRYLRGCRNQTFHLGARAGFLKEIRKELEKTRWGKAKEAEHVVLTDKTVAAIRAIIDNDAKALGARLLADLSGAFVAHYASKEHFSTLYSEIVKAVKDAPEVSSGLPRLKLLLKRADGVRGYVHGLRDTRKHAFATKLPPPPAPRELDDPATKARYIALLRLYDGPFRAYASGITGTALAGPAARAKEAATALAQSVNVTKAYSDVMEGRTSRLRPPNDGETLREYLSALTGETATEFRVQIGYESDSENARKQAEFIENYRRDMLAFMFEDYIRAKGFDWILKIEPGATAMTRAPVLPEPIDTRGQYEHWQAALYLVMHFVPASDVSNLLHQLRKWEALQGKYELVQDGDATDQADARREALDLVKRFRDVLVLFLKTGEARFEGRAAPFDLKPFRALFANPATFDRLFMATPTTARPAEDDPEGDGASEPELRVARTLRGLRQIARYNHMAVLSDLFAKHKVRDEEVARLAEIEDETQEKSQIVAAQELRTDLHDKVMKCHPKTISPEERQSYAAAIKTIEEHRFLVGRVYLGDHLRLHRLMMDVIGRLIDYAGAYERDTGTFLINASKQLGAGADWAVTIAGAANTDARTQTRKDLAHFNVLDRADGTPDLTALVNRAREMMAYDRKRKNAVPRSILDMLARLGLTLKWQMKDHLLQDATITQAAIKHLDKVRLTVGGPAAVTEARFSQDYLQMVAAVFNGSVQNPKPRRRDDGDAWHKPPKPATAQSQPDQKPPNKAPSAGSRLPPPQVGEVYEGVVVKVIDTGSLGFLAVEGVAGNIGLHISRLRRIREDAIIVGRRYRFRVEIYVPPKSNTSKLNAADLVRID

SEQ ID NO: 61 - protein, 1285 aa, Rhodobacter capsulatus
MQIGKVQGRTISEFGDPAGGLKRKISTDGKNRKELPAHLSSDPKALIGQWISGIDKIYRKPDSRKSDGKAIHSPTPSKMQFDARDDLGEAFWKLVSEAGLAQDSDYDQFKRRLHPYGDKFQPADSGAKLKFEADPPEPQAFHGRWYGAMSKRGNDAKELAAALYEHLHVDEKRIDGQPKRNPKTDKFAPGLVVARALGIESSVLPRGMARLARNWGEEEIQTYFVVDVAASVKEVAKAAVSAAQAFDPPRQVSGRSLSPKVGFALAEHLERVTGSKRCSFDPAAGPSVLALHDEVKKTYKRLCARGKNAARAFPADKTELLALMRHTHENRVRNQMVRMGRVSEYRGQQAGDLAQSHYWTSAGQTEIKESEIFVRLWVGAFALAGRSMKAWIDPMGKIVNTEKNDRDLTAAVNIRQVISNKEMVAEAMARRGIYFGETPELDRLGAEGNEGFVFALLRYLRGCRNQTFHLGARAGFLKEIRKELEKTRWGKAKEAEHVVLTDKTVAAIRAIIDNDAKALGARLLADLSGAFVAHYASKEHFSTLYSEIVKAVKDAPEVSSGLPRLKLLLKRADGVRGYVHGLRDTRKHAFATKLPPPPAPRELDDPATKARYIALLRLYDGPFRAYASGITGTALAGPAARAKEAATALAQSVNVTKAYSDVMEGRSSRLRPPNDGETLREYLSALTGETATEFRVQIGYESDSENARKQAEFIENYRRDMLAFMFEDYIRAKGFDWILKIEPGATAMTRAPVLPEPIDTRGQYEHWQAALYLVMHFVPASDVSNLLHQLRKWEALQGKYELVQDGDATDQADARREALDLVKRFRDVLVLFLKTGEARFEGRAAPFDLKPFRALFANPATFDRLFMATPTTARPAEDDPEGDGASEPELRVARTLRGLRQIARYNHMAVLSDLFAKHKVRDEEVARLAEIEDETQEKSQIVAAQELRTDLHDKVMKCHPKTISPEERQSYAAAIKTIEEHRFLVGRVYLGDHLRLHRLMMDVIGRLIDYAGAYERDTGTFLINASKQLGAGADWAVTIAGAANTDARTQTRKDLAHFNVLDRADGTPDLTALVNRAREMMAYDRKRKNAVPRSILDMLARLGLTLKWQMKDHLLQDATITQAAIKHLDKVRLTVGGPAAVTEARFSQDYLQMVAAVFNGSVQNPKPRRRDDGDAWHKPPKPATAQSQPDQKPPNKAPSAGSRLPPPQVGEVYEGVVVKVIDTGSLGFLAVEGVAGNIGLHISRLRRIREDAIIVGRRYRFRVEIYVPPKSNTSKLNAADLVRID

SEQ ID NO: 62 - protein, 1285 aa, Rhodobacter capsulatus; identical to SEQ ID NO: 61

SEQ ID NO: 63 - protein, 1389 aa, Leptotrichia shahii
MGNLFGHKRWYEVRDKKDFKIKRKVKVKRNYDGNKYILNINENNNKEKIDNNKFIRKYINYKKNDNILKEFTRKFHAGNILFKLKGKEGIIRIENNDDFLETEEVVLYIEAYGKSEKLKALGITKKKIIDEAIRQGITKDDKKIEIKRQENEEEIEIDIRDEYTNKTLNDCSIILRIIENDELETKKSIYEIFKNINMSLYKIIEKIIENETEKVFENRYYEEHLREKLLKDDKIDVILTNFMEIREKIKSNLEILGFVKFYLNVGGDKKKSKNKKMLVEKILNINVDLTVEDIADFVIKELEFWNITKRIEKVKKVNNEFLEKRRNRTYIKSYVLLDKHEKFKIERENKKDKIVKFFVENIKNNSIKEKIEKILAEFKIDELIKKLEKELKKGNCDTEIFGIFKKHYKVNFDSKKFSKKSDEEKELYKIIYRYLKGRIEKILVNEQKVRLKKMEKIEIEKILNESILSEKILKRVKQYTLEHIMYLGKLRHNDIDMTTVNTDDFSRLHAKEELDLELITFFASTNMELNKIFSRENINNDENIDFFGGDREKNYVLDKKILNSKIKIIRDLDFIDNKNNITNNFIRKFTKIGTNERNRILHAISKERDLQGTQDDYNKVINIIQNLKISDEEVSKALNLDVVFKDKKNIITKINDIKISEENNNDIKYLPSFSKVLPEILNLYRNNPKNEPFDTIETEKIVLNALIYVNKELYKKLILEDDLEENESKNIFLQELKKTLGNIDEIDENIIENYYKNAQISASKGNNKAIKKYQKKVIECYIGYLRKNYEELFDFSDFKMNIQEIKKQIKDINDNKTYERITVKTSDKTIVINDDFEYIISIFALLNSNAVINKIRNRFFATSVWLNTSEYQNIIDILDEIMQLNTLRNECITENWNLNLEEFIQKMKEIEKDFDDFKIQTKKEIFNNYYEDIKNNILTEFKDDINGCDVLEKKLEKIVIFDDETKFEIDKKSNILQDEQRKLSNINKKDLKKKVDQYIKDKDQEIKSKILCRIIFNSDFLKKYKKEIDNLIEDMESENENKFQEIYYPKERKNELYIYKKNLFLNIGNPNFDKIYGLISNDIKMADAKFLFNIDGKNIRKNKISEIDAILKNLNDKLNGYSKEYKEKYIKKLKENDDFFAKNIQNKNYKSFEKDYNRVSEYKKIRDLVEFNYLNKIESYLIDINWKLAIQMARFERDMHYIVNGLRELGIIKLSGYNTGISRAYPKRNGSDGFYTTTAYYKFFDEESYKKFEKICYGFGIDLSENSEINKPENESIRNYISHFYIVRNPFADYSIAEQIDRVSNLLSYSTRYNNSTYASVFEVFKKDVNLDYDELKKKFKLIGNNDILERLMKPKKVSVLELESYNSDYIKNLIIELLTKIENTNDTL

SEQ ID NO: 64 - protein, 1197 aa, Leptotrichia wadei
MKVTKVDGISHKKYIEEGKLVKSTSEENRTSERLSELLSIRLDIYIKNPDNASEEENRIRRENLKKFFSNKVLHLKDSVLYLKNRKEKNAVQDKNYSEEDISEYDLKNKNSFSVLKKILLNEDVNSEELEIFRKDVEAKLNKINSLKYSFEENKANYQKINENNVEKVGGKSKRNIIYDYYRESAKRNDYINNVQEAFDKLYKKEDIEKLFFLIENSKKHEKYKIREYYHKIIGRKNDKENFAKIIYEEIQNVNNIKELIEKIPDMSELKKSQVFYKYYLDKEELNDKNIKYAFCHFVEIEMSQLLKNYVYKRLSNISNDKIKRIFEYQNLKKLIENKLLNKLDTYVRNCGKYNYYLQVGEIATSDFIARNRQNEAFLRNIIGVSSVAYFSLRNILETENENDITGRMRGKTVKNNKGEEKYVSGEVDKIYNENKQNEVKENLKMFYSYDFNMDNKNEIEDFFANIDEAISSIRHGIVHFNLELEGKDIFAFKNIAPSEISKKMFQNEINEKKLKLKIFKQLNSANVFNYYEKDVIIKYLKNTKFNFVNKNIPFVPSFTKLYNKIEDLRNTLKFFWSVPKDKEEKDAQIYLLKNIYYGEFLNKFVKNSKVFFKITNEVIKINKQRNQKTGHYKYQKFENIEKTVPVEYLAIIQSREMINNQDKEEKNTYIDFIQQIFLKGFIDYLNKNNLKYIESNNNNDNNDIFSKIKIKKDNKEKYDKILKNYEKHNRNKEIPHEINEFVREIKLGKILKYTENLNMFYLILKLLNHKELTNLKGSLEKYQSANKEETFSDELELINLLNLDNNRVTEDFELEANEIGKFLDFNENKIKDRKELKKFDTNKIYFDGENIIKHRAFYNIKKYGMLNLLEKIADKAKYKISLKELKEYSNKKNEIEKNYTMQQNLHRKYARPKKDEKFNDEDYKEYEKAIGNIQKYTHLKNKVEFNELNLLQGLLLKILHRLVGYTSIWERDLRFRLKGEFPENHYIEEIFNFDNSKNVKYKSGQIVEKYINFYKELYKDNVEKRSIYSDKKVKKLKQEKKDLYIRNYIAHFNYIPHAEISLLEVLENLRKLLSYDRKLKNAIMKSIVDILKEYGFVATFKIGADKKIEIQTLESEKIVHLKNLKKKKLMTDRNSEELCELVKVMFEYKALEKRPAATKKAGQAKKKKGSYPYDVPDYAYPYDVPDYAYPYDVPDYA

SEQ ID NO: 65 - protein, 1120 aa, Listeria seeligeri
MWISIKTLIHHLGVLFFCDYMYNRREKKIIEVKTMRITKVEVDRKKVLISRDKNGGKLVYENEMQDNTEQIMHHKKSSFYKSVVNKTICRPEQKQMKKLVHGLLQENSQEKIKVSDVTKLNISNFLNHRFKKSLYYFPENSPDKSEEYRIEINLSQLLEDSLKKQQGTFICWESFSKDMELYINWAENYISSKTKLIKKSIRNNRIQSTESRSGQLMDRYMKDILNKNKPFDIQSVSEKYQLEKLTSALKATFKEAKKNDKEINYKLKSTLQNHERQIIEELKENSELNQFNIEIRKHLETYFPIKKTNRKVGDIRNLEIGEIQKIVNHRLKNKIVQRILQEGKLASYEIESTVNSNSLQKIKIEEAFALKFINACLFASNNLRNMVYPVCKKDILMIGEFKNSFKEIKHKKFIRQWSQFFSQEITVDDIELASWGLRGAIAPIRNEIIHLKKHSWKKFFNNPTFKVKKSKIINGKTKDVTSEFLYKETLFKDYFYSELDSVPELIINKMESSKILDYYSSDQLNQVFTIPNFELSLLTSAVPFAPSFKRVYLKGFDYQNQDEAQPDYNLKLNIYNEKAFNSEAFQAQYSLFKMVYYQVFLPQFTTNNDLFKSSVDFILTLNKERKGYAKAFQDIRKMNKDEKPSEYMSYIQSQLMLYQKKQEEKEKINHFEKFINQVFIKGFNSFIEKNRLTYICHPTKNTVPENDNIEIPFHTDMDDSNIAFWLMCKLLDAKQLSELRNEMIKFSCSLQSTEEISTFTKAREVIGLALLNGEKGCNDWKELFDDKEAWKKNMSLYVSEELLQSLPYTQEDGQTPVINRSIDLVKKYGTETILEKLFSSSDDYKVSAKDIAKLHEYDVTEKIAQQESLHKQWIEKPGLARDSAWTKKYQNVINDISNYQWAKTKVELTQVRHLHQLTIDLLSRLAGYMSIADRDFQFSSNYILERENSEYRVTSWILLSENKNKNKYNDYELYNLKNASIKVSSKNDPQLKVDLKQLRLTLEYLELFDNRLKEKRNNISHFNYLNGQLGNSILELFDDARDVLSYDRKLKNAVSKSLKEILSSHGMEVTFKPLYQTNHHLKIDKLQPKKIHHLGEKSTVSSNQVSNEYCQLVRTLLTMK

SEQ ID NO: 66 - protein, 1159 aa, Leptotrichia buccalis
MKVTKVGGISHKKYTSEGRLVKSESEENRTDERLSALLNMRLDMYIKNPSSTETKENQKRIGKLKKFFSNKMVYLKDNTLSLKNGKKENIDREYSETDILESDVRDKKNFAVLKKIYLNENVNSEELEVFRNDIKKKLNKINSLKYSFEKNKANYQKINENNIEKVEGKSKRNIIYDYYRESAKRDAYVSNVKEAFDKLYKEEDIAKLVLEIENLTKLEKYKIREFYHEIIGRKNDKENFAKIIYEEIQNVNNMKELIEKVPDMSELKKSQVFYKYYLDKEELNDKNIKYAFCHFVEIEMSQLLKNYVYKRLSNISNDKIKRIFEYQNLKKLIENKLLNKLDTYVRNCGKYNYYLQDGEIATSDFIARNRQNEAFLRNIIGVSSVAYFSLRNILETENENDITGRMRGKTVKNNKGEEKYVSGEVDKIYNENKKNEVKENLKMFYSYDFNMDNKNEIEDFFANIDEAISSIRHGIVHFNLELEGKDIFAFKNIAPSEISKKMFQNEINEKKLKLKIFRQLNSANVFRYLEKYKILNYLKRTRFEFVNKNIPFVPSFTKLYSRIDDLKNSLGIYWKTPKTNDDNKTKEIIDAQIYLLKNIYYGEFLNYFMSNNGNFFEISKEIIELNKNDKRNLKTGFYKLQKFEDIQEKIPKEYLANIQSLYMINAGNQDEEEKDTYIDFIQKIFLKGFMTYLANNGRLSLIYIGSDEETNTSLAEKKQEFDKFLKKYEQNNNIKIPYEINEFLREIKLGNILKYTERLNMFYLILKLLNHKELTNLKGSLEKYQSANKEEAFSDQLELINLLNLDNNRVTEDFELEADEIGKFLDFNGNKVKDNKELKKFDTNKIYFDGENIIKHRAFYNIKKYGMLNLLEKIADKAGYKISIEELKKYSNKKNEIEKNHKMQENLHRKYARPRKDEKFTDEDYESYKQAIENIEEYTHLKNKVEFNELNLLQGLLLRILHRLVGYTSIWERDLRFRLKGEFPENQYIEEIFNFENKKNVKYKGGQIVEKYIKFYKELHQNDEVKINKYSSANIKVLKQEKKDLYIRNYIAHFNYIPHAEISLLEVLENLRKLLSYDRKLKNAVMKSVVDILKEYGFVATFKIGADKKIGIQTLESEKIVHLKNLKKKKLMTDRNSEELCKLVKIMFEYKMEEKKSEN

SEQ ID NO: 67 - protein, 1285 aa, Herbinix hemicellulosilytica
MKLTRRRISGNSVDQKITAAFYRDMSQGLLYYDSEDNDCTDKVIESMDFERSWRGRILKNGEDDKNPFYMFVKGLVGSNDKIVCEPIDVDSDPDNLDILINKNLTGFGRNLKAPDSNDTLENLIRKIQAGIPEEEVLPELKKIKEMIQKDIVNRKEQLLKSIKNNRIPFSLEGSKLVPSTKKMKWLFKLIDVPNKTFNEKMLEKYWEIYDYDKLKANITNRLDKTDKKARSISRAVSEELREYHKNLRTNYNRFVSGDRPAAGLDNGGSAKYNPDKEEFLLFLKEVEQYFKKYFPVKSKHSNKSKDKSLVDKYKNYCSYKVVKKEVNRSIINQLVAGLIQQGKLLYYFYYNDTWQEDFLNSYGLSYIQVEEAFKKSVMTSLSWGINRLTSFFIDDSNTVKFDDITTKKAKEAIESNYFNKLRTCSRMQDHFKEKLAFFYPVYVKDKKDRPDDDIENLIVLVKNAIESVSYLRNRTFHFKESSLLELLKELDDKNSGQNKIDYSVAAEFIKRDIENLYDVFREQIRSLGIAEYYKADMISDCFKTCGLEFALYSPKNSLMPAFKNVYKRGANLNKAYIRDKGPKETGDQGQNSYKALEEYRELTWYIEVKNNDQSYNAYKNLLQLIYYHAFLPEVRENEALITDFINRTKEWNRKETEERLNTKNNKKHKNFDENDDITVNTYRYESIPDYQGESLDDYLKVLQRKQMARAKEVNEKEEGNNNYIQFIRDVVVWAFGAYLENKLKNYKNELQPPLSKENIGLNDTLKELFPEEKVKSPFNIKCRFSISTFIDNKGKSTDNTSAEAVKTDGKEDEKDKKNIKRKDLLCFYLFLRLLDENEICKLQHQFIKYRCSLKERRFPGNRTKLEKETELLAELEELMELVRFTMPSIPEISAKAESGYDTMIKKYFKDFIEKKVFKNPKTSNLYYHSDSKTPVTRKYMALLMRSAPLHLYKDIFKGYYLITKKECLEYIKLSNIIKDYQNSLNELHEQLERIKLKSEKQNGKDSLYLDKKDFYKVKEYVENLEQVARYKHLQHKINFESLYRIFRIHVDIAARMVGYTQDWERDMHFLFKALVYNGVLEERRFEAIFNNNDDNNDGRIVKKIQNNLNNKNRELVSMLCWNKKLNKNEFGAIIWKRNPIAHLNHFTQTEQNSKSSLESLINSLRILLAYDRKRQNAVTKTINDLLLNDYHIRIKWEGRVDEGQIYFNIKEKEDIENEPIIHLKHLHKKDCYIYKNSYMFDKQKEWICNGIKEEVYDKSILKCIGNLFKFDYEDKNKSSANPKHT

SEQ ID NO: 68 - protein, 1344 aa, Eubacterium rectale
MLRRDKEVKKLYNVFNQIQVGTKPKKWNNDEKLSPEENERRAQQKNIKMKNYKWREACSKYVESSQRIINDVIFYSYRKAKNKLRYMRKNEDILKKMQEAEKLSKFSGGKLEDFVAYTLRKSLVVSKYDTQEFDSLAAMVVFLECIGKNNISDHEREIVCKLLELIRKDFSKLDPNVKGSQGANIVRSVRNQNMIVQPQGDRFLFPQVYAKENETVTNKNVEKEGLNEFLLNYANLDDEKRAESLRKLRRILDVYFSAPNHYEKDMDITLSDNIEKEKFNVWEKHECGKKETGLFVDIPDVLMEAEAENIKLDAVVEKRERKVLNDRVRKQNIICYRYTRAVVEKYNSNEPLFFENNAINQYWIHHIENAVERILKNCKAGKLFKLRKGYLAEKVWKDAINLISIKYIALGKAVYNFALDDIWKDKKNKELGIVDERIRNGITSFDYEMIKAHENLQRELAVDIAFSVNNLARAVCDMSNLGNKESDFLLWKRNDIADKLKNKDDMASVSAVLQFFGGKSSWDINIFKDAYKGKKKYNYEVRFIDDLRKAIYCARNENFHFKTALVNDEKWNTELFGKIFERETEFCLNVEKDRFYSNNLYMFYQVSELRNMLDHLYSRSVSRAAQVPSYNSVIVRTAFPEYITNVLGYQKPSYDADTLGKWYSACYYLLKEIYYNSFLQSDRALQLFEKSVKTLSWDDKKQQRAVDNFKDHFSDIKSACTSLAQVCQIYMTEYNQQNNQIKKVRSSNDSIFDQPVYQHYKVLLKKAIANAFADYLKNNKDLFGFIGKPFKANEIREIDKEQFLPDWTSRKYEALCIEVSGSQELQKWYIVGKFLNARSLNLMVGSMRSYIQYVTDIKRRAASIGNELHVSVHDVEKVEKWVQVIEVCSLLASRTSNQFEDYFNDKDDYARYLKSYVDFSNVDMPSEYSALVDFSNEEQSDLYVDPKNPKVNRNIVHSKLFAADHILRDIVEPVSKDNIEEFYSQKAEIAYCKIKGKEITAEEQKAVLKYQKLKNRVELRDIVEYGEIINELLGQLINWSFMRERDLLYFQLGFHYDCLRNDSKKPEGYKNIKVDENSIKDAILYQIIGMYVNGVTVYAPEKDGDKLKEQCVKGGVGVKVSAFHRYSKYLGLNEKTLYNAGLEIFEVVAEHEDIINLRNGIDHFKYYLGDYRSMLSIYSEVFDRFFTYDIKYQKNVLNLLQNILLRHNVIVEPILESGFKTIGEQTKPGAKLSIRSIKSDTFQYKVKGGTLITDAKDERYLETIRKILYYAENEEDNLKKSVVVTNADKYEKNKESDDQNKQKEKKNKDNKGKKNEETKSDAEKNNNERLSYNPFANLNFKLSN

SEQ ID NO: 69 - protein, 1373 aa, Eubacteriaceae bacterium
MKISKESHKRTAVAVMEDRVGGVVYVPGGSGIDLSNNLKKRSMDTKSLYNVFNQIQAGTAPSEYEWKDYLSEAENKKREAQKMIQKANYELRRECEDYAKKANLAVSRIIFSKKPKKIFSDDDIISHMKKQRLSKFKGRMEDFVLIALRKSLVVSTYNQEVFDSRKAATVFLKNIGKKNISADDERQIKQLMALIREDYDKWNPDKDSSDKKESSGTKVIRSIEHQNMVIQPEKNKLSLSKISNVGKKTKTKQKEKAGLDAFLKEYAQIDENSRMEYLKKLRRLLDTYFAAPSSYIKGAAVSLPENINFSSELNVWERHEAAKKVNINFVEIPESLLNAEQNNNKINKVEQEHSLEQLRTDIRRRNITCYHFANALAADERYHTLFFENMAMNQFWIHHMENAVERILKKCNVGTLFKLRIGYLSEKVWKDMLNLLSIKYIALGKAVYHFALDDIWKADIWKDASDKNSGKINDLTLKGISSFDYEMVKAQEDLQREMAVGVAFSTNNLARVTCKMDDLSDAESDFLLWNKEAIRRHVKYTEKGEILSAILQFFGGRSLWDESLFEKAYSDSNYELKFLDDLKRAIYAARNETFHFKTAAIDGGSWNTRLFGSLFEKEAGLCLNVEKNKFYSNNLVLFYKQEDLRVFLDKLYGKECSRAAQIPSYNTILPRKSFSDFMKQLLGLKEPVYGSAILDQWYSACYYLFKEVYYNLFLQDSSAKALFEKAVKALKGADKKQEKAVESFRKRYWEISKNASLAEICQSYITEYNQQNNKERKVRSANDGMFNEPIYQHYKMLLKEALKMAFASYIKNDKELKFVYKPTEKLFEVSQDNFLPNWNSEKYNTLISEVKNSPDLQKWYIVGKFMNARMLNLLLGSMRSYLQYVSDIQKRAAGLGENQLHLSAENVGQVKKWIQVLEVCLLLSVRISDKFTDYFKDEEEYASYLKEYVDFEDSAMPSDYSALLAFSNEGKIDLYVDASNPKVNRNIIQAKLYAPDMVLKKVVKKISQDECKEFNEKKEQIMQFKNKGDEVSWEEQQKILEYQKLKNRVELRDLSEYGELINELLGQLINWSYLRERDLLYFQLGFHYSCLMNESKKPDAYKTIRRGTVSIENAVLYQIIAMYINGFPVYAPEKGELKPQCKTGSAGQKIRAFCQWASMVEKKKYELYNAGLELFEVVKEHDNIIDLRNKIDHFKYYQGNDSILALYGEIFDRFFTYDMKYRNNVLNHLQNILLRHNVIIKPIISKDKKEVGRGKMKDRAAFLLEEVSSDRFTYKVKEGERKIDAKNRLYLETVRDILYFPNRAVNDKGEDVIICSKKAQDLNEKKADRDKNHDKSKDTNQKKEGKNQEEKSENKEPYSDRMTWKPFAGIKLE

SEQ ID NO: 70 - protein, 1276 aa, Blautia sp.
MKISKVDHVKSGIDQKLSSQRGMLYKQPQKKYEGKQLEEHVRNLSRKAKALYQVFPVSGNSKMEKELQIINSFIKNILLRLDSGKTSEEIVGYINTYSVASQISGDHIQELVDQHLKESLRKYTCVGDKRIYVPDIIVALLKSKFNSETLQYDNSELKILIDFIREDYLKEKQIKQIVHSIENNSTPLRIAEINGQKRLIPANVDNPKKSYIFEFLKEYAQSDPKGQESLLQHMRYLILLYLYGPDKITDDYCEEIEAWNFGSIVMDNEQLFSEEASMLIQDRIYVNQQIEEGRQSKDTAKVKKNKSKYRMLGDKIEHSINESVVKHYQEACKAVEEKDIPWIKYISDHVMSVYSSKNRVDLDKLSLPYLAKNTWNTWISFIAMKYVDMGKGVYHFAMSDVDKVGKQDNLIIGQIDPKFSDGISSFDYERIKAEDDLHRSMSGYIAFAVNNFARAICSDEFRKKNRKEDVLTVGLDEIPLYDNVKRKLLQYFGGASNWDDSIIDIIDDKDLVACIKENLYVARNVNFHFAGSEKVQKKQDDILEEIVRKETRDIGKHYRKVFYSNNVAVFYCDEDIIKLMNHLYQREKPYQAQIPSYNKVISKTYLPDLIFMLLKGKNRTKISDPSIMNMFRGTFYFLLKEIYYNDFLQASNLKEMFCEGLKNNVKNKKSEKPYQNFMRRFEELENMGMDFGEICQQIMTDYEQQNKQKKKTATAVMSEKDKKIRTLDNDTQKYKHFRTLLYIGLREAFIIYLKDEKNKEWYEFLREPVKREQPEEKEFVNKWKLNQYSDCSELILKDSLAAAWYVVAHFINQAQLNHLIGDIKNYIQFISDIDRRAKSTGNPVSESTEIQIERYRKILRVLEFAKFFCGQITNVLTDYYQDENDFSTHVGHYVKFEKKNMEPAHALQAFSNSLYACGKEKKKAGFYYDGMNPIVNRNITLASMYGNKKLLENAMNPVTEQDIRKYYSLMAELDSVLKNGAVCKSEDEQKNLRHFQNLKNRIELVDVLTLSELVNDLVAQLIGWVYIRERDMMYLQLGLHYIKLYFTDSVAEDSYLRTLDLEEGSIADGAVLYQIASLYSFNLPMYVKPNKSSVYCKKHVNSVATKFDIFEKEYCNGDETVIENGLRLFENINLHKDMVKFRDYLAHFKYFAKLDESILELYSKAYDFFFSYNIKLKKSVSYVLTNVLLSYFINAKLSFSTYKSSGNKTVQHRTTKISVVAQTDYFTYKLRSIVKNKNGVESIENDDRRCEVVNIAARDKEFVDEVCNVINYNSDK

SEQ ID NO: 71 - protein, 1385 aa, Leptotrichia sp.
MGNLFGHKRWYEVRDKKDFKIKRKVKVKRNYDGNKYILNINENNNKEKIDNNKFIGEFVNYKKNNNVLKEFKRKFHAGNILFKLKGKEEIIRIENNDDFLETEEVVLYIEVYGKSEKLKALEITKKKIIDEAIRQGITKDDKKIEIKRQENEEEIEIDIRDEYTNKTLNDCSIILRIIENDELETKKSIYEIFKNINMSLYKIIEKIIENETEKVFENRYYEEHLREKLLKDNKIDVILTNFMEIREKIKSNLEIMGFVKFYLNVSGDKKKSENKKMFVEKILNTNVDLTVEDIVDFIVKELKFWNITKRIEKVKKFNNEFLENRRNRTYIKSYVLLDKHEKFKIERENKKDKIVKFFVENIKNNSIKEKIEKILAEFKINELIKKLEKELKKGNCDTEIFGIFKKHYKVNFDSKKFSNKSDEEKELYKIIYRYLKGRIEKILVNEQKVRLKKMEKIEIEKILNESILSEKILKRVKQYTLEHIMYLGKLRHNDIVKMTVNTDDFSRLHAKEELDLELITFFASTNMELNKIFNGKEKVTDFFGFNLNGQKITLKEKVPSFKLNILKKLNFINNENNIDEKLSHFYSFQKEGYLLRNKILHNSYGNIQETKNLKGEYENVEKLIKELKVSDEEISKSLSLDVIFEGKVDIINKINSLKIGEYKDKKYLPSFSKIVLEITRKFREINKDKLFDIESEKIILNAVKYVNKILYEKITSNEENEFLKTLPDKLVKKSNNKKENKNLLSIEEYYKNAQVSSSKGDKKAIKKYQNKVTNAYLEYLENTFTEIIDFSKFNLNYDEIKTKIEERKDNKSKIIIDSISTNINITNDIEYIISIFALLNSNTYINKIRNRFFATSVWLEKQNGTKEYDYENIISILDEVLLINLLRENNITDILDLKNAIIDAKIVENDETYIKNYIFESNEEKLKKRLFCEELVDKEDIRKIFEDENFKFKSFIKKNEIGNFKINFGILSNLECNSEVEAKKIIGKNSKKLESFIQNIIDEYKSNIRTLFSSEFLEKYKEEIDNLVEDTESENKNKFEKIYYPKEHKNELYIYKKNLFLNIGNPNFDKIYGLISKDIKNVDTKILFDDDIKKNKISEIDAILKNLNDKLNGYSNDYKAKYVNKLKENDDFFAKNIQNENYSSFGEFEKDYNKVSEYKKIRDLVEFNYLNKIESYLIDINWKLAIQMARFERDMHYIVNGLRELGIIKLSGYNTGISRAYPKRNGSDGFYTTTAYYKFFDEESYKKFEKICYGFGIDLSENSEINKPENESIRNYISHFYIVRNPFADYSIAEQIDRVSNLLSYSTRYNNSTYASVFEVFKKDVNLDYDELKKKFRLIGNNDILERLMKPKKVSVLELESYNSDYIKNLIIELLTKIENTNDTL

SEQ ID NO: 72 - protein, 1334 aa, Other
MKISKVDHTRMAVAKGNQHRRDEISGILYKDPTKTGSIDFDERFKKLNCSAKILYHVFNGIAEGSNKYKNIVDKVNNNLDRVLFTGKSYDRKSIIDIDTVLRNVEKINAFDRISTEEREQIIDDLLEIQLRKGLRKGKAGLREVLLIGAGVIVRTDKKQEIADFLEILDEDFNKTNQAKNIKLSIENQGLVVSPVSRGEERIFDVSGAQKGKSSKKAQEKEALSAFLLDYADLDKNVRFEYLRKIRRLINLYFYVKNDDVMSLTEIPAEVNLEKDFDIWRDHEQRKEENGDFVGCPDILLADRDVKKSNSKQVKIAERQLRESIREKNIKRYRFSIKTIEKDDGTYFFANKQISVFWIHRIENAVERILGSINDKKLYRLRLGYLGEKVWKDILNFLSIKYIAVGKAVFNFAMDDLQEKDRDIEPGKISENAVNGLTSFDYEQIKADEMLQREVAVNVAFAANNLARVTVDIPQNGEKEDILLWNKSDIKKYKKNSKKGILKSILQFFGGASTWNMKMFEIAYHDQPGDYEENYLYDIIQIIYSLRNKSFHFKTYDHGDKNWNRELIGKMIEHDAERVISVEREKFHSNNLPMFYKDADLKKILDLLYSDYAGRASQVPAFNTVLVRKNFPEFLRKDMGYKVHFNNPEVENQWHSAVYYLYKEIYYNLFLRDKEVKNLFYTSLKNIRSEVSDKKQKLASDDFASRCEEIEDRSLPEICQIIMTEYNAQNFGNRKVKSQRVIEKNKDIFRHYKMLLIKTLAGAFSLYLKQERFAFIGKATPIPYETTDVKNFLPEWKSGMYASFVEEIKNNLDLQEWYIVGRFLNGRMLNQLAGSLRSYIQYAEDIERRAAENRNKLFSKPDEKIEACKKAVRVLDLCIKISTRISAEFTDYFDSEDDYADYLEKYLKYQDDAIKELSGSSYAALDHFCNKDDLKFDIYVNAGQKPILQRNIVMAKLFGPDNILSEVMEKVTESAIREYYDYLKKVSGYRVRGKCSTEKEQEDLLKFQRLKNAVEFRDVTEYAEVINELLGQLISWSYLRERDLLYFQLGFHYMCLKNKSFKPAEYVDIRRNNGTIIHNAILYQIVSMYINGLDFYSCDKEGKTLKPIETGKGVGSKIGQFIKYSQYLYNDPSYKLEIYNAGLEVFENIDEHDNITDLRKYVDHFKYYAYGNKMSLLDLYSEFFDRFFTYDMKYQKNVVNVLENILLRHFVIFYPKFGSGKKDVGIRDCKKERAQIEISEQSLTSEDFMFKLDDKAGEEAKKFPARDERYLQTIAKLLYYPNEIEDMNRFMKKGETINKKVQFNRKKKITRKQKNNSSNEVLSSTMGYLFKNIKL

SEQ ID NO: 73 - protein, 500 aa, Chloroflexus aggregans
MTDQVRREEVAAGELADTPLAAAQTPAADAAVAATPAPAEAVAPTPEQAVDQPATTGESEAPVTTAQAAAHEAEPAEATGASFTPVSEQQPQKPRRLKDLQPGMELEGKVTSIALYGIFVDVGVGRDGLVHISEMSDRRIDTPSELVQIGDTVKVWVKSVDLDARRISLTMLNPSRGEKPRRSRQSQPAQPQPRRQEVDREKLASLKVGEIVEGVITGFAPFGAFADIGVGKDGLIHISELSEGRVEKPEDAVKVGERYQFKVLEIDGEGTRISLSLRRAQRTQRMQQLEPGQIIEGTVSGIATFGAFVDIGVGRDGLVHISALAPHRVAKVEDVVKVGDKVKVKVLGVDPQSKRISLTMRLEEEQPATTAGDEAAEPAEEVTPTRRGNLERFAAAAQTARERSERGERSERGERRERRERRPAQSSPDTYIVGEDDDESFEGNATIEDLLTKFGGSSSRRDRDRRRRHEDDDDEEMERPSNRRQREAIRRTLQQIGYDE

SEQ ID NO: 74 - protein, 249 aa, Demequina aurantiaca
MDLTWHALLILFIVALLAGFLDTLAGGGGLLTVPALLLTGIPPLQALGTNKLQSSFGTGMATYQVIRKKRVHWRDVRWPMVWAFLGSAAGAVAVQFIDTDALLIIIPVVLALVAAYFLFVPKSHLPPPEPRMSDPAYEATLVPIIGAYDGAFGPGTGSLYALSGVALRAKTLVQSTAIAKTLNFATNFAALLVFAFAGHMLWTVGAVMIAGQLIGAYAGSHMLFRVNPLVLRVLIVVMSLGMLIRVLLD

SEQ ID NO: 75 - protein, 1235 aa, Thalassospira sp.
MRIIKPYGRSHVEGVATQEPRRKLRLNSSPDISRDIPGFAQSHDALIIAQWISAIDKIATKPKPDKKPTQAQINLRTTLGDAAWQHVMAENLLPAATDPAIREKLHLIWQSKIAPWGTARPQAEKDGKPTPKGGWYERFCGVLSPEAITQNVARQIAKDIYDHLHVAAKRKGREPAKQGESSNKPGKFKPDRKRGLIEERAESIAKNALRPGSHAPCPWGPDDQATYEQAGDVAGQIYAAARDCLEEKKRRSGNRNTSSVQYLPRDLAAKILYAQYGRVFGPDTTIKAALDEQPSLFALHKAIKDCYHRLINDARKRDILRILPRNMAALFRLVRAQYDNRDINALIRLGKVIHYHASEQGKSEHHGIRDYWPSQQDIQNSRFWGSDGQADIKRHEAFSRIWRHIIALASRTLHDWADPHSQKFSGENDDILLLAKDAIEDDVFKAGHYERKCDVLFGAQASLFCGAEDFEKAILKQAITGTGNLRNATFHFKGKVRFEKELQELTKDVPVEVQSAIAALWQKDAEGRTRQIAETLQAVLAGHFLTEEQNRHIFAALTAAMAQPGDVPLPRLRRVLARHDSICQRGRILPLSPCPDRAKLEESPALTCQYTVLKMLYDGPFRAWLAQQNSTILNHYIDSTIARTDKAARDMNGRKLAQAEKDLITSRAADLPRLSVDEKMGDFLARLTAATATEMRVQRGYQSDGENAQKQAAFIGQFECDVIGRAFADFLNQSGFDFVLKLKADTPQPDAAQCDVTALIAPDDISVSPPQAWQQVLYFILHLVPVDDASHLLHQIRKWQVLEGKEKPAQIAHDVQSVLMLYLDMHDAKFTGGAALHGIEKFAEFFAHAADFRAVFPPQSLQDQDRSIPRRGLREIVRFGHLPLLQHMSGTVQITHDNVVAWQAARTAGATGMSPIARRQKQREELHALAVERTARFRNADLQNYMHALVDVIKHRQLSAQVTLSDQVRLHRLMMGVLGRLVDYAGLWERDLYFVVLALLYHHGATPDDVFKGQGKKNLADGQVVAALKPKNRKAAAPVGVFDDLDHYGIYQDDRQSIRNGLSHFNMLRGGKAPDLSHWVNQTRSLVAHDRKLKNAVAKSVIEMLAREGFDLDWGIQTDRGQHILSHGKIRTRQAQHFQKSRLHIVKKSAKPDKNDTVKIRENLHGDAMVERVVQLFAAQVQKRYDITVEKRLDHLFLKPQDQKGKNGIHTHNGWSKTEKKRRPSRENRKGNHEN

SEQ ID NO: 76 - protein, 1312 aa, Pseudobutyrivibrio sp.
MKFSKESHRKTAVGVTESNGIIGLLYKDPLNEKEKIEDVVNQRANSTKRLFNLFGTEATSKDISRASKDLAKVVNKAIGNLKGNKKFNKKEQITKGLNTKIIVEELKNVLKDEKKLIVNKDIIDEACSRLLKTSFRTAKTKQAVKMILTAVLIENTNLSKEDEAFVHEYFVKKLVNEYNKTSVKKQIPVALSNQNMVIQPNSVNGTLEISETKKSKETKTTEKDAFRAFLRDYATLDENRRHKMRLCLRNLVNLYFYGETSVSKDDFDEWRDHEDKKQNDELFVKKIVSIKTDRKGNVKEVLDVDATIDAIRTNNIACYRRALAYANENPDVFFSDTMLNKFWIHHVENEVERIYGHINNNTGDYKYQLGYLSEKVWKGIINYLSIKYIAEGKAVYNYAMNALAKDNNSNAFGKLDEKFVNGITSFEYERIKAEETLQRECAVNIAFAANHLANATVDLNEKDSDFLLLKHEDNKDTLGAVARPNILRNILQFFGGKSRWNDFDFSGIDEIQLLDDLRKMIYSLRNSSFHFKTENIDNDSWNTKLIGDMFAYDFNMAGNVQKDKMYSNNVPMFYSTSDIEKMLDRLYAEVHERASQVPSFNSVFVRKNFPDYLKNDLKITSAFGVDDALKWQSAVYYVCKEIYYNDFLQNPETFTMLKDYVQCLPIDIDKSMDQKLKSERNAHKNFKEAFATYCKECDSLSAICQMIMTEYNNQNKGNRKVISARTKDGDKLIYKHYKMILFEALKNVFTIYLEKNINTYGFLKKPKLINNVPAIEEFLPNYNGRQYETLVNRITEETELQKWYIVGRLLNPKQVNQLIGNFRSYVQYVNDVARRAKQTGNNLSNDNIAWDVKNIIQIFDVCTKLNGVTSNILEDYFDDGDDYARYLKNFVDYTNKNNDHSATLLGDFCAKEIDGIKIGIYHDGTNPIVNRNIIQCKLYGATGIISDLTKDGSILSVDYEIIKKYMQMQKEIKVYQQKGICKTKEEQQNLKKYQELKNIVELRNIIDYSEILDELQGQLINWGYLRERDLMYFQLGFHYLCLHNESKKPVGYNNAGDISGAVLYQIVAMYTNGLSLIDANGKSKKNAKASAGAKVGSFCSYSKEIRGVDKDTKEDDDPIYLAGVELFENINEHQQCINLRNYIEHFHYYAKHDRSMLDLYSEVFDRFFTYDMKYTKNVPNMMYNILLQHLVVPAFEFGSSEKRLDDNDEQTKPRAMFTLREKNGLSSEQFTYRLGDGNSTVKLSARGDDYLRAVASLLYYPDRAPEGLIRDAEAEDKFAKINHSNPKSDNRNNRGNFKNPKVQWYNNKTKRK

SEQ ID NO: 77 - protein, 1343 aa, Butyrivibrio sp.
MKISKVDHRKTAVKITDNKGAEGFIYQDPTRDSSTMEQIISNRARSSKVLFNIFGDTKKSKDLNKYTESLIIYVNKAIKSLKGDKRNNKYEEITESLKTERVLNALIQAGNEFTCSENNIEDALNKYLKKSFRVGNTKSALKKLLMAAYCGYKLSIEEKEEIQNYFVDKLVKEYNKDTVLKYTAKSLKHQNMVVQPDTDNHVFLPSRIAGATQNKMSEKEALTEFLKAYAVLDEEKRHNLRIILRKLVNLYFYESPDFIYPENNEWKEHDDRKNKTETFVSPVKVNEEKNGKTFVKIDVPATKDLIRLKNIECYRRSVAETAGNPITYFTDHNISKFWIHHIENEVEKIFALLKSNWKDYQFSVGYISEKVWKEIINYLSIKYIAIGKAVYNYALEDIKKNDGTLNFGVIDPSFYDGINSFEYEKIKAEETFQREVAVYVSFAVNHLSSATVKLSEAQSDMLVLNKNDIEKIAYGNTKRNILQFFGGQSKWKEFDFDRYINPVNYTDIDFLFDIKKMVYSLRNESFHFTTTDTESDWNKNLISAMFEYECRRISTVQKNKFFSNNLPLFYGENSLERVLHKLYDDYVDRMSQVPSFGNVFVRKKFPDYMKEIGIKHNLSSEDNLKLQGALYFLYKEIYYNAFISSEKAMKIFVDLVNKLDTNARDDKGRITHEAMAHKNFKDAISHYMTHDCSLADICQKIMTEYNQQNTGHRKKQTTYSSEKNPEIFRHYKMILFMLLQKAMTEYISSEEIFDFIMKPNSPKTDIKEEEFLPQYKSCAYDNLIKLIADNVELQKWYITARLLSPREVNQLIGSFRSYKQFVSDIERRAKETNNSLSKSGMTVDVENITKVLDLCTKLNGRFSNELTDYFDSKDDYAVYVSKFLDFGFKIDEKFPAALLGEFCNKEENGKKIGIYHNGTEPILNSNIIKSKLYGITDVVSRAVKPVSEKLIREYLQQEVKIKPYLENGVCKNKEEQAALRKYQELKNRIEFRDIVEYSEIINELMGQLINFSYLRERDLMYFQLGFHYLCLNNYGAKPEGYYSIVNDKRTIKGAILYQIVAMYTYGLPIYHYVDGTISDRRKNKKTVLDTLNSSETVGAKIKYFIYYSDELFNDSLILYNAGLELFENINEHENIVNLRKYIDHFKYYVSQDRSLLDIYSEVFDRYFTYDRKYKKNVMNLFSNIMLKHFIITDFEFSTGEKTIGEKNTAKKECAKVRIKRGGLSSDKFTYKFKDAKPIELSAKNTEFLDGVARILYYPENVVLTDLVRNSEVEDEKRIEKYDRNHNSSPTRKDKTYKQDVKKNYNKKTSKAFDSSKLDTKSVGNNLSDNPVLKQFLSESKKKR

SEQ ID NO: 78 - protein, 1276 aa, Blautia sp.; identical to SEQ ID NO: 70

SEQ ID NO: 79 - protein, 1168 aa, Leptotrichia sp.
MKITKIDGISHKKYIKEGKLVKSTSEENKTDERLSELLTIRLDTYIKNPDNASEEENRIRRENLKEFFSNKVLYLKDGILYLKDRREKNQLQNKNYSEEDISEYDLKNKNNFLVLKKILLNEDINSEELEIFRNDFEKKLDKINSLKYSLEENKANYQKINENNIKKVEGKSKRNIFYNYYKDSAKRNDYINNIQEAFDKLYKKEDIENLFFLIENSKKHEKYKIRECYHKIIGRKNDKENFATIIYEEIQNVNNMKELIEKVPNVSELKKSQVFYKYYLNKEKLNDENIKYVFCHFVEIEMSKLLKNYVYKKPSNISNDKVKRIFEYQSLKKLIENKLLNKLDTYVRNCGKYSFYLQDGEIATSDFIVGNRQNEAFLRNIIGVSSTAYFSLRNILETENENDITGRMRGKTVKNNKGEEKYISGEIDKLYDNNKQNEVKKNLKMFYSYDFNMNSKKEIEDFFSNIDEAISSIRHGIVHFNLELEGKDIFTFKNIVPSQISKKMFHDEINEKKLKLKIFKQLNSANVFRYLEKYKILNYLNRTRFEFVNKNIPFVPSFTKLYSRIDDLKNSLGIYWKTPKTNDDNKTKEITDAQIYLLKNIYYGEFLNYFMSNNGNFFEITKEIIELNKNDKRNLKTGFYKLQKFENLQEKTPKEYLANIQSLYMINAGNQDEEEKDTYIDFIQKIFLKGFMTYLANNGRLSLIYIGSDEETNTSLAEKKQEFDKFLKKYEQNNNIEIPYEINEFVREIKLGKILKYTERLNMFYLILKLLNHKELTNLKGSLEKYQSANKEEAFSDQLELINLLNLDNNRVTEDFELEADEIGKFLDFNGNKVKDNKELKKFDTNKIYFDGENIIKHRAFYNIKKYGMLNLLEKISDEAKYKISIEELKNYSKKKNEIEENHTTQENLHRKYARPRKDEKFTDEDYKKYEKAIRNIQQYTHLKNKVEFNELNLLQSLLLRILHRLVGYTSIWERDLRFRLKGEFPENQYIEEIFNFDNSKNVKYKNGQIVEKYINFYKELYKDDTEKISIYSDKKVKELKKEKKDLYIRNYIAHFNYIPNAEISLLEMLENLRKLLSYDRKLKNAIMKSIVDILKEYGFVVTFKIEKDKKIRIESLKSEEVVHLKKLKLKDNDKKKEPIKTYRNSKELCKLVKVMFEYKMKEKKSEN

SEQ ID NO: 80 - protein, 1138 aa, Bacteroides ihuae
MRITKVKVKESSDQKDKMVLIHRKVGEGTLVLDENLADLTAPIIDKYKDKSFELSLLKQTLVSEKEMNIPKCDKCTAKERCLSCKQREKRLKEVRGAIEKTIGAVIAGRDIIPRLNIFNEDEICWLIKPKLRNEFTFKDVNKQVVKLNLPKVLVEYSKKNDPTLFLAYQQWIAAYLKNKKGHIKKSILNNRVVIDYSDESKLSKRKQALELWGEEYETNQRIALESYHTSYNIGELVTLLPNPEEYVSDKGEIRPAFHYKLKNVLQMHQSTVFGTNEILCINPIFNENRANIQLSAYNLEVVKYFEHYFPIKKKKKNLSLNQAIYYLKVETLKERLSLQLENALRMNLLQKGKIKKHEFDKNTCSNTLSQIKRDEFFVLNLVEMCAFAANNIRNIVDKEQVNEILSKKDLCNSLSKNTIDKELCTKFYGADFSQIPVAIWAMRGSVQQIRNEIVHYKAEAIDKIFALKTFEYDDMEKDYSDTPFKQYLELSIEKIDSFFIEQLSSNDVLNYYCTEDVNKLLNKCKLSLRRTSIPFAPGFKTIYELGCHLQDSSNTYRIGHYLMLIGGRVANSTVTKASKAYPAYRFMLKLIYNHLFLNKFLDNHNKRFFMKAVAFVLKDNRENARNKFQYAFKEIRMMNNDESIASYMSYIHSLSVQEQEKKGDKNDKVRYNTEKFIEKVFVKGFDDFLSWLGVEFILSPNQEERDKTVTREEYENLMIKDRVEHSINSNQESHIAFFTFCKLLDANHLSDLRNEWIKFRSSGDKEGFSYNFAIDIIELCLLTVDRVEQRRDGYKEQTELKEYLSFFIKGNESENTVWKGFYFQQDNYTPVLYSPIELIRKYGTLELLKLIIVDEDKITQGEFEEWQTLKKVVEDKVTRRNELHQEWEDMKNKSSFSQEKCSIYQKLCRDIDRYNWLDNKLHLVHLRKLHNLVIQILSRMARFIALWDRDFVLLDASRANDDYKLLSFFNFRDFINAKKTKTDDELLAEFGSKIEKKNAPFIKAEDVPLMVECIEAKRSFYQKVFFRNNLQVLADRNFIAHYNYISKTAKCSLFEMIIKLRTLMYYDRKLRNAVVKSIANVFDQNGMVLQLSLDDSHELKVDKVISKRIVHLKNNNIMTDQVPEEYYKICRRLLEMKK

SEQ ID NO: 81 - protein, 697 aa, Other
MEFRDSIFKSLLQKEIEKAPLCFAEKLISGGVFSYYPSERLKEFVGNHPFSLFRKTMPFSPGFKRVMKSGGNYQNANRDGRFYDLDIGVYLPKDGFGDEEWNARYFLMKLIYNQLFLPYFADAENHLFRECVDFVKRVNRDYNCKNNNSEEQAFIDIRSMREDESIADYLAFIQSNIIIEENKKKETNKEGQINFNKFLLQVFVKGFDSFLKDRTELNFLQLPELQGDGTRGDDLESLDKLGAVVAVDLKLDATGIDADLNENISFYTFCKLLDSNHLSRLRNEIIKYQSANSDFSHNEDFDYDRIISIIELCMLSADHVSTNDNESIFPNNDKDFSGIRPYLSTDAKVETFEDLYVHSDAKTPITNATMVLNWKYGTDKLFERLMISDQDFLVTEKDYFVWKELKKDIEEKIKLREELHSLWVNTPKGKKGAKKKNGRETTGEFSEENKKEYLEVCREIDRYVNLDNKLHFVHLKRMHSLLIELLGRFVGFTYLFERDYQYYHLEIRSRRNKDAGVVDKLEYNKIKDQNKYDKDDFFACTFLYEKANKVRNFIAHFNYLTMWNSPQEEEHNSNLSGAKNSSGRQNLKCSLTELINELREVMSYDRKLKNAVTKAVIDLFDKHGMVIKFRIVNNNNNDNKNKHHLELDDIVPKKIMHLRGIKLKRQDGKPIPIQTDSVDPLYCRMWKKLLDLKPTPF

SEQ ID NO: 82 - protein, 204 aa, Listeria riparia
MHDAWAENPKKPQSDAFLKEYKACCEAIDTYNWHKNKATLVYVNELHHLLIDILGRLVGYVAIADRDFQCMANQYLKSSGHTERVDSWINTIRKNRPDYIEKLDIFMNKAGLFVSEKNGRNYIAHLNYLSPKHKYSLLYLFEKLREMLKYDRKLKNAVTKSLIDLLDKHGMCVVFANLKNNKHRLVIASLKPKKIETFKWKKIK

SEQ ID NO: 83 - protein, 1082 aa, Insolitispirillum peregrinum
MRIIRPYGSSTVASPSPQDAQPLRSLQRQNGTFDVAEFSRRHPELVLAQWVAMLDKIIRKPAPGKNSTALPRPTAEQRRLRQQVGAALWAEMQRHTPVPPELKAVWDSKVHPYSKDNAPATAKTPSHRGRWYDRFGDPETSAATVAEGVRRHLLDSAQPFRANGGQPKGKGVIEHRALTIQNGTLLHHHQSEKAGPLPEDWSTYRADELVSTIGKDARWIKVAASLYQHYGRIFGPTTPISEAQTRPEFVLHTAVKAYYRRLFKERKLPAERLERLLPRTGEALRHAVTVQHGNRSLADAVRIGKILHYGWLQNGEPDPWPDDAALYSSRYWGSDGQTDIKHSEAVSRVWRRALTAAQRTLTSWLYPAGTDAGDILLIGQKPDSIDRNRLPLLYGDSTRHWTRSPGDVWLFLKQTLENLRNSSFHFKTLSAFTSHLDGTCESEPAEQQAAQALWQDDRQQDHQQVFLSLRALDATTYLPTGPLHRIVNAVQSTDATLPLPRFRRVVTRAANTRLKGFPVEPVNRRTMEDDPLLRCRYGVLKLLYERGFRAWLETRPSIASCLDQSLKRSTKAAQTINGKNSPQGVEILSRATKLLQAEGGGGHGIHDLFDRLYAATAREMRVQVGYHHDAEAARQQAEFIEDLKCEVVARAFCAYLKTLGIQGDTFRRQPEPLPTWPDLPDLPSSTIGTAQAALYSVLHLMPVEDVGSLLHQLRRWLVALQARGGEDGTAITATIPLLELYLNRHDAKFSGGGAGTGLRWDDWQVFFDCQATFDRVFPPGPALDSHRLPLRGLREVLRFGRVNDLAALIGQDKITAAEVDRWHTAEQTIAAQQQRREALHEQLSRKKGTDAEVDEYRALVTAIADHRHLTAHVTLSNVVRLHRLMTTVLGRLVDYGGLWERDLTFVTLYEAHRLGGLRNLLSESRVNKFLDGQTPAALSKKNNAEENGMISKVLGDKARRQIRNDFAHFNMLQQGKKTINLTDEINNARKLMAHDRKLKNAITRSVTTLLQQDGLDIVWTMDASHRLTDAKIDSRNAIHLHKTHNRANIREPLHGKSYCRWVAALFGATSTPSATKKSDKIR

SEQ ID NO: 84 - protein, 1154 aa, Paludibacter propionicigenes
MKTSANNIYFNGINSFKKIFDSKGAIAPIAEKSCRNFDIKAQNDVNKEQRIHYFAVGHTFKQLDTENLFEYVLDENLRAKRPTRFISLQQFDKEFIENIKRLISDIRNINSHYIHRFDPLKIDAVPTNIIDFLKESFELAVIQIYLKEKGINYLQFSENPHADQKLVAFLHDKFLPLDEKKTSMLQNETPQLKEYKEYRKYFKTLSKQAAIDQLLFAEKETDYIWNLFDSHPVLTISAGKYLSFYSCLFLLSMFLYKSEANQLISKIKGFKKNTTEEEKSKREIFTFFSKRFNSMDIDSEENQLVKFRDLILYLNHYPVAWNKDLELDSSNPAMTDKLKSKIIELEINRSFPLYEGNERFATFAKYQIWGKKHLGKSIEKEYINASFTDEEITAYTYETDTCPELKDAHKKLADLKAAKGLFGKRKEKNESDIKKTETSIRELQHEPNPIKDKLIQRIEKNLLTVSYGRNQDRFMDFSARFLAEINYFGQDASFKMYHFYATDEQNSELEKYELPKDKKKYDSLKFHQGKLVHFISYKEHLKRYESWDDAFVIENNAIQLKLSFDGVENTVTIQRALLIYLLEDALRNIQNNTAENAGKQLLQEYYSHNKADLSAFKQILTQQDSIEPQQKTEFKKLLPRRLLNNYSPAINHLQTPHSSLPLILEKALLAEKRYCSLVVKAKAEGNYDDFIKRNKGKQFKLQFIRKAWNLMYFRNSYLQNVQAAGHHKSFHIERDEFNDFSRYMFAFEELSQYKYYLNEMFEKKGFFENNEFKILFQSGTSLENLYEKTKQKFEIWLASNTAKTNKPDNYHLNNYEQQFSNQLFFINLSHFINYLKSTGKLQTDANGQIIYEALNNVQYLIPEYYYTDKPERSESKSGNKLYNKLKATKLEDALLYEMAMCYLKADKQIADKAKHPITKLLTSDVEFNITNKEGIQLYHLLVPFKKIDAFIGLKMHKEQQDKKHPTSFLANIVNYLELVKNDKDIRKTYEAFSTNPVKRTLTYDDLAKIDGHLISKSIKFTNVTLELERYFIFKESLIVKKGNNIDFKYIKGLRNYYNNEKKKNEGIRNKAFHFGIPDSKSYDQLIRDAEVMFIANEVKPTHATKYTDLNKQLHTVCDKLMETVHNDYFSKEGDGKKKREAAGQKYFENIISAK

SEQ ID NO: 85 - protein, 1090 aa, Prevotella sp.
MNIPALVENQKKYFGTYSVMAMLNAQTVLDHIQKVADIEGEQNENNENLWFHPVMSHLYNAKNGYDKQPEKTMFIIERLQSYFPFLKIMAENQREYSNGKYKQNRVEVNSNDIFEVLKRAFGVLKMYRDLTNHYKTYEEKLIDGCEFLTSTEQPFSGMISKYYTVALRNTKERYGYKAEDLAFIQDNRYKFTKDAYGKRKSQVNTGSFLSLQDYNGDTTKKLHLSGVGIALLICLFLDKQYINLFLSRLPIFSSYNAQSEERRIIIRSFGINSIKQPKDRIHSEKSNKSVAMDMLNEVKRCPDELFTTLSAEKQSRFRIISDDHNEVLMKRSSDRFVPLLLQYIDYGKLFDHIRFHVNMGKLRYLLKADKTCIDGQTRVRVIEQPLNGFGRLEEVETMRKQENGTFGNSGIRIRDFENMKRDDANPANYPYIVETYTHYILENNKVEMFISDEENPTPLLPVIEDDRYVVKTIPSCRMSTLEIPAMAFHMFLFGSEKTEKLIIDVHDRYKRLFQAMQKEEVTAENIASFGIAESDLPQKIMDLISGNAHGKDVDAFIRLTVDDMLTDTERRIKRFKDDRKSIRSADNKMGKRGFKQISTGKLADFLAKDIVLFQPSVNDGENKITGLNYRIMQSAIAVYDSGDDYEAKQQFKLMFEKARLIGKGTTEPHPFLYKVFVRSIPANAVDFYERYLIERKFYLIGLSNEIKKGNRVDVPFIRRDQNKWKTPAMKTLGRIYSEDLPVELPRQMFDNEIKSHLKSLPQMEGIDFNNANVTYLIAEYMKRVLNDDFQTFYQWKRNYRYMDMLRGEYDRKGSLQHCFTSIEEREGLWKERASRTERYRKLASNKIRSNRQMRNASSEEIETILDKRLSNCRNEYQKSEKIIRRYRVQDALLFLLAKKTLTELADFDGERFKLKEIMPDAEKGILSEIMPMSFTFEKGGKIYTITSGGMKLKNYGDFFVLASDKRIGNLLELVGSNTVSKEDIMEEFKKYDQCRPEISSIVFNLEKWAFDTYPELPARVDRKEKVDFWSILDVLSNNKDINNEQSYILRKIRNAFDHNNYPDKGIVEIKALPEIAMSIKKAFGEYAIMK

SEQ ID NO: 86 - protein, 1090 aa, Prevotella sp.
MNIPALVENQKKYFGTYSVMAMLNAQTVLDHIQKVADIEGEQNENNENLWFHPVMSHLYNAKNGYDKQPEKTMFIIERLQSYFPFLKIMAENQREYSNGKYKQNRVEVNSNDIFEVLKRAFGVLKMYRDQASHYKTYDEKLIDGCEFLTSTEQPLSGMINNYYTVALRNMNERYGYKTEDLAFIQDKRFKFVKDAYGKKKSQVNTGFFLSLQDYNGDTQKKLHLSGVGIALLICLFLDKQYINIFLSRLPIFSSYNAQSEERRIIIRSFGINSIKQPKDRIHSEKSNKSVAMDMLNEIKRCPNELFETLSAEKQSRFRIISNDHNEVLMKRSSDRFVPLLLQYIDYGKLFDHIRFHVNMGKLRYLLKADKTCIDGQTRVRVIEQPLNGFGRLEEVETMRKQENGTFGNSGIRIRDFENMKRDDANPANYPYIVDTYTHYILENNKVEMFISDEETPAPLLPVIEDDRYVVKTIPSCRMSTLEIPAMAFHMFLFGSKKTEKLIVDVHNRYKRLFKAMQKEEVTAENIASFGIAESDLPQKIIDLISGNAHGKDVDAFIRLTVDDMLADTERRIKRFKDDRKSIRSADNKMGKRGFKQISTGKLADFLAKDIVLFQPSVNDGENKITGLNYRIMQSAIAVYNSGDDYEAKQQFKLMFEKARLIGKGTTEPHPFLYKVFVRSIPANAVDFYERYLIERKFYLIGLSNEIKKGNRVDVPFIRRDQNKWKTPAMKTLGRIYDEDLPVELPRQMFDNEIKSHLKSLPQMEGIDFNNANVTYLIAEYMKRVLNDDFQTFYQWKRNYRYMDMLRGEYDRKGSLQSCFTSVEEREGLWKERASRTERYRKLASNKIRSNRQMRNASSEEIETILDKRLSNSRNEYQKSEKVIRRYRVQDALLFLLAKKTLTELADFDGERFKLKEIMPDAEKGILSEIMPMSFTFEKGGKKYTITSEGMKLKNYGDFFVLASDKRIGNLLELVGSDTVSKEDIMEEFKKYDQCRPEISSIVFNLEKWAFDTYPELSARVDREEKVDFKSILKILLNNKNINKEQSDILRKIRNAFDHNNYPDKGVVEIRALPEIAMSIKKAFGEYAIMK

SEQ ID NO: 87 - protein, 1090 aa, Prevotella sp.
MNIPALVENQKKYFGTYSVMAMLNAQTVLDHIQKVADIEGEQNENNENLWFHPVMSHLYNAKNGYDKQPEKTMFIIERLQSYFPFLKIMAENQREYSNGKYKQNRVEVNSNDIFEVLKRAFGVLKMYRDLTNHYKTYEEKLNDGCEFLTSTEQPLSGMINNYYTVALRNMNERYGYKTEDLAFIQDKRFKFVKDAYGKKKSQVNTGFFLSLQDYNGDTQKKLHLSGVGIALLICLFLDKQYINIFLSRLPIFSSYNAQSEERRIIIRSFGINSIKLPKDRIHSEKSNKSVAMDMLNEVKRCPDELFTTLSAEKQSRFRIISDDHNEVLMKRSSDRFVPLLLQYIDYGKLFDHIRFHVNMGKLRYLLKADKTCIDGQTRVRVIEQPLNGFGRLEEAETMRKQENGTFGNSGIRIRDFENMKRDDANPANYPYIVDTYTHYILENNKVEMFINDKEDSAPLLPVIEDDRYVVKTIPSCRMSTLEIPAMAFHMFLFGSKKTEKLIVDVHNRYKRLFQAMQKEEVTAENIASFGIAESDLPQKILDLISGNAHGKDVDAFIRLTVDDMLTDTERRIKRFKDDRKSIRSADNKMGKRGFKQISTGKLADFLAKDIVLFQPSVNDGENKITGLNYRIMQSAIAVYDSGDDYEAKQQFKLMFEKARLIGKGTTEPHPFLYKVFARSIPANAVEFYERYLIERKFYLTGLSNEIKKGNRVDVPFIRRDQNKWKTPAMKTLGRIYSEDLPVELPRQMFDNEIKSHLKSLPQMEGIDFNNANVTYLIAEYMKRVLDDDFQTFYQWNRNYRYMDMLKGEYDRKGSLQHCFTSVEEREGLWKERASRTERYRKQASNKIRSNRQMRNASSEEIETILDKRLSNSRNEYQKSEKVIRRYRVQDALLFLLAKKTLTELADFDGERFKLKEIMPDAEKGILSEIMPMSFTFEKGGKKYTITSEGMKLKNYGDFFVLASDKRIGNLLELVGSDIVSKEDIMEEFNKYDQCRPEISSIVFNLEKWAFDTYPELSARVDREEKVDFKSILKILLNNKNINKEQSDILRKIRNAFDHNNYPDKGVVEIKALPEIAMSIKKAFGEYAIMK

SEQ ID NO: 88 - protein, 1090 aa, Prevotella sp.
MNIPALVENQKKYFGTYSVMAMLNAQTVLDHIQKVADIEGEQNENNENLWFHPVMSHLYNAKNGYDKQPEKTMFIIERLQSYFPFLKIMAENQREYSNGKYKQNRVEVNSNDIFEVLKRAFGVLKMYRDLTNHYKTYEEKLIDGCEFLTSTEQPLSGMISKYYTVALRNTKERYGYKTEDLAFIQDNIKKITKDAYGKRKSQVNTGFFLSLQDYNGDTQKKLHLSGVGIALLICLFLDKQYINIFLSRLPIFSSYNAQSEERRIIIRSFGINSIKLPKDRIHSEKSNKSVAMDMLNEVKRCPDELFTTLSAEKQSRFRIISDDHNEVLMKRSTDRFVPLLLQYIDYGKLFDHIRFHVNMGKLRYLLKADKTCIDGQTRVRVIEQPLNGFGRLEEAETMRKQENGTFGNSGIRIRDFENVKRDDANPANYPYIVDTYTHYILENNKVEMFISDKGSSAPLLPLIEDDRYVVKTIPSCRMSTLEIPAMAFHMFLFGSKKTEKLIVDVHNRYKRLFQAMQKEEVTAENIASFGIAESDLPQKILDLISGNAHGKDVDAFIRLTVDDMLTDTERRIKRFKDDRKSIRSADNKMGKRGFKQISTGKLADFLAKDIVLFQPSVNDGENKITGLNYRIMQSAIAVYDSGDDYEAKQQFKLMFEKARLIGKGTTEPHPFLYKVFARSIPANAVDFYERYLIERKFYLTGLCNEIKRGNRVDVPFIRRDQNKWKTPAMKTLGRIYSEDLPVELPRQMFDNEIKSHLKSLPQMEGIDFNNANVTYLIAEYMKRVLNDDFQTFYQWKRNYHYMDMLKGEYDRKGSLQHCFTSVEEREGLWKERASRTERYRKLASNKIRSNRQMRNASSEEIETILDKRLSNCRNEYQKSEKVIRRYRVQDALLFLLAKKTLTELADFDGERFKLKEIMPDAEKGILSEIMPMSFTFEKGGKKYTITSEGMKLKNYGDFFVLASDKRIGNLLELVGSDIVSKEDIMEEFNKYDQCRPEISSIVFNLEKWAFDTYPELSARVDREEKVDFKSILKILLNNKNINKEQSDILRKIRNAFDHNNYPDKGIVEIKALPEIAMSIKKAFGEYAIMK

SEQ ID NO: 89 - protein, 1199 aa, Capnocytophaga canimorsus
MKNIQRLGKGNEFSPFKKEDKFYFGGFLNLANNNIEDFFKEIITRFGIVITDENKKPKETFGEKILNEIFKKDISIVDYEKWVNIFADYFPFTKYLSLYLEEMQFKNRVICFRDVMKELLKTVEALRNFYTHYDHEPIKIEDRVFYFLDKVLLDVSLTVKNKYLKTDKTKEFLNQHIGEELKELCKQRKDYLVGKGKRIDKESEIINGIYNNAFKDFICKREKQDDKENHNSVEKILCNKEPQNKKQKSSATVWELCSKSSSKYTEKSFPNRENDKHCLEVPISQKGIVFLLSFFLNKGEIYALTSNIKGFKAKITKEEPVTYDKNSIRYMATHRMFSFLAYKGLKRKIRTSEINYNEDGQASSTYEKETLMLQMLDELNKVPDVVYQNLSEDVQKTFIEDWNEYLKENNGDVGTMEEEQVIHPVIRKRYEDKFNYFAIRFLDEFAQFPTLRFQVHLGNYLCDKRTKQICDTTTEREVKKKITVFGRLSELENKKAIFLNEREEIKGWEVFPNPSYDFPKENISVNYKDFPIVGSILDREKQPVSNKIGIRVKIADELQREIDKAIKEKKLRNPKNRKANQDEKQKERLVNEIVSTNSNEQGEPVVFIGQPTAYLSMNDIHSVLYEFLINKISGEALETKIVEKIETQIKQIIGKDATTKILKPYTNANSNSINREKLLRDLEQEQQILKTLLEEQQQREKDKKDKKSKRKHELYPSEKGKVAVWLANDIKRFMPKAFKEQWRGYHHSLLQKYLAYYEQSKEELKNLLPKEVFKHFPFKLKGYFQQQYLNQFYTDYLKRRLSYVNELLLNIQNFKNDKDALKATEKECFKFFRKQNYIINPINIQIQSILVYPIFLKRGFLDEKPTMIDREKFKENKDTELADWFMHYKNYKEDNYQKFYAYPLEKVEEKEKFKRNKQINKQKKNDVYTLMMVEYIIQKIFGDKFVEENPLVLKGIFQSKAERQQNNTHAATTQERNLNGILNQPKDIKIQGKITVKGVKLKDIGNFRKYEIDQRVNTFLDYEPRKEWMAYLPNDWKEKEKQGQLPPNNVIDRQISKYETVRSKILLKDVQELEKIISDEIKEEHRHDLKQGKYYNFKYYILNGLLRQLKNENVENYKVFKLNTNPEKVNITQLKQEATDLEQKAFVLTYIRNKFAHNQLPKKEFWDYCQEKYGKIEKEKTYAEYFAEVFKREKEALIK

SEQ ID NO: 90 - protein, 1131 aa, Phaeodactylibacter xiamenensis
MTNTPKRRTLHRHPSYFGAFLNIARHNAFMIMEHLSTKYDMEDKNTLDEAQLPNAKLFGCLKKRYGKPDVTEGVSRDLRRYFPFLNYPLFLHLEKQQNAEQAATYDINPEDIEFTLKGFFRLLNQMRNNYSHYISNTDYGKFDKLPVQDIYEAAIFRLLDRGKHTKRFDVFESKHTRHLESNNSEYRPRSLANSPDHENTVAFVTCLFLERKYAFPFLSRLDCFRSTNDAAEGDPLIRKASHECYTMFCCRLPQPKLESSDILLDMVNELGRCPSALYNLLSEEDQARFHIKREEITGFEEDPDEELEQEIVLKRHSDRFPYFALRYFDDTEAFQTLRFDVYLGRWRTKPVYKKRIYGQERDRVLTQSIRTFTRLSRLLPIYENVKHDAVRQNEEDGKLVNPDVTSQFHKSWIQIESDDRAFLSDRIEHFSPHYNFGDQVIGLKFINPDRYAAIQNVFPKLPGEEKKDKDAKLVNETADAIISTHEIRSLFLYHYLSKKPISAGDERRFIQVDTETFIKQYIDTIKLFFEDIKSGELQPIADPPNYQKNEPLPYVRGDKEKTQEERAQYRERQKEIKERRKELNTLLQNRYGLSIQYIPSRLREYLLGYKKVPYEKLALQKLRAQRKEVKKRIKDIEKMRTPRVGEQATWLAEDIVFLTPPKMHTPERKTTKHPQKLNNDQFRIMQSSLAYFSVNKKAIKKFFQKETGIGLSNRETSHPFLYRIDVGRCRGILDFYTGYLKYKMDWLDDAIKKVDNRKHGKKEAKKYEKYLPSSIQHKTPLELDYTRLPVYLPRGLFKKAIVKALAAHADFQVEPEEDNVIFCLDQLLDGDTQDFYNWQRYYRSALTEKETDNQLVLAHPYAEQILGTIKTLEGKQKNNKLGNKAKQKIKDELIDLKRAKRRLLDREQYLRAVQAEDRALWLMIQERQKQKAEHEEIAFDQLDLKNITKILTESIDARLRIPDTKVDITDKLPLRRYGDLRRVAKDRRLVNLASYYHVAGLSEIPYDLVKKELEEYDRRRVAFFEHVYQFEKEVYDRYAAELRNENPKGESTYFSHWEYVAVAVKHSADTHFNELFKEKVMQLRNKFHHNEFPYFDWLLPEVEKASAALYADRVFDVAEGYYQKMRKLMRQ

SEQ ID NO: 91 - protein, 1135 aa, Porphyromonas gingivalis
MNTVPASENKGQSRTVEDDPQYFGLYLNLARENLIEVESHVRIKFGKKKLNEESLKQSLLCDHLLSVDRWTKVYGHSRRYLPFLHYFDPDSQIEKDHDSKTGVDPDSAQRLIRELYSLLDFLRNDFSHNRLDGTTFEHLEVSPDISSFITGTYSLACGRAQSRFADFFKPDDFVLAKNRKEQLISVADGKECLTVSGLAFFICLFLDREQASGMLSRIRGFKRTDENWARAVHETFCDLCIRHPHDRLESSNTKEALLLDMLNELNRCPRILYDMLPEEERAQFLPALDENSMNNLSENSLNEESRLLWDGSSDWAEALTKRIRHQDRFPYLMLRFIEEMDLLKGIRFRVDLGEIELDSYSKKVGRNGEYDRTITDHALAFGKLSDFQNEEEVSRMISGEASYPVRFSLFAPRYAIYDNKIGYCHTSDPVYPKSKTGEKRALSNPQSMGFISVHNLRKLLLMELLCEGSFSRMQSDFLRKANRILDETAEGKLQFSALFPEMRHRFIPPQNPKSKDRREKAETTLEKYKQEIKGRKDKLNSQLLSAFDMNQRQLPSRLLDEWMNIRPASHSVKLRTYVKQLNEDCRLRLRKFRKDGDGKARAIPLVGEMATFLSQDIVRMIISEETKKLITSAYYNEMQRSLAQYAGEENRRQFRAIVAELHLLDPSSGHPFLSATMETAHRYTEDFYKCYLEKKREWLAKTFYRPEQDENTKRRISVFFVPDGEARKLLPLLIRRRMKEQNDLQDWIRNKQAHPIDLPSHLFDSKIMELLKVKDGKKKWNEAFKDWWSTKYPDGMQPFYGLRRELNIHGKSVSYIPSDGKKFADCYTHLMEKTVQDKKRELRTAGKPVPPDLAADIKRSFHRAVNEREFMLRLVQEDDRLMLMAINKMMTDREEDILPGLKNIDSILDEENQFSLAVHAKVLEKEGEGGDNSLSLVPATIEIKSKRKDWSKYIRYRYDRRVPGLMSHFPEHKATLDEVKTLLGEYDRCRIKIFDWAFALEGAIMSDRDLKPYLHESSSREGKSGEHSTLVKMLVEKKGCLTPDESQYLILIRNKAAHNQFPCAAEMPLIYRDVSAKVGSIEGSSAKDLPEGSSLVDSLWKKYEMIIRKILPILDPENRFFGKLLNNMSQPINDL

SEQ ID NO: 92 - protein, 1135 aa, Porphyromonas gingivalis
MNTVPASENKGQSRTVEDDPQYFGLYLNLARENLIEVESHVRIKFGKKKLNEESLKQSLLCDHLLSVDRWTKVYGHSRRYLPFLHYFDPDSQIEKDHDSKTGVDPDSAQRLIRELYSLLDFLRNDFSHNRLDGTTFEHLEVSPDISSFITGTYSLACGRAQSRFADFFKPDDFVLAKNRKEQLISVADGKECLTVSGLAFFICLFLDREQASGMLSRIRGFKRTNENWARAVHETFCDLCIRHPHDRLESSNTKEALLLDMLNELNRCPRILYDMLPEEERAQFLPALDENSMNNLSENSLNEESRLLWDGSSDWAEALTKRIRHQDRFPYLMLRFIEEMDLLKGIRFRVDLGEIELDSYSKKVGRNGEYDRTITDHALAFGKLSDFQNEEEVSRMISGEASYPVRFSLFAPRYAIYDNKIGYCHTSDPVYPKSKTGEKRALSNPQSMGFISVHDLRKLLLMELLCEGSFSRMQSGFLRKANRILDETAEGKLQFSALFPEMRHRFIPPQNPKSKDRREKAETTLEKYKQEIKGRKDKLNSQLLSAFDMNQRQLPSRLLDEWMNIRPASHSVKLRTYVKQLNEDCRLRLRKFRKDGDGKARAIPLVGEMATFLSQDIVRMIISEETKKLITSAYYNEMQRSLAQYAGEENRRQFRAIVAELHLLDPSSGHPFLSATMETAHRYTEDFYKCYLEKKREWLAKTFYRPEQDENTKRRISVFFVPDGEARKLLPLLIRRRMKEQNDLQDWIRNKQAHPIDLPSHLFDSKIMELLKVKDGKKKWNEAFKDWWSTKYPDGMQPFYGLRRELNIHGKSVSYIPSDGKKFADCYTHLMEKTVQDKKRELRTAGKPVPPDLAADIKRSFHRAVNEREFMLRLVQEDDRLMLMAINKMMTDREEDILPGLKNIDSILDKENQFSLAVHAKVLEKEGEGGDNSLSLVPATIEIKSKRKDWSKYIRYRYDRRVPGLMSHFPEHKATLDEVKTLLGEYDRCRIKIFDWAFALEGAIMSDRDLKPYLHESSSREGKSGEHSTLVKMLVEKKGCLTPDESQYLILIRNKAAHNQFPCAAEMPLIYRDVSAKVGSIEGSSAKDLPEGSSLVDSLWKKYEMIIRKILPILDHENRFFGKLLNNMSQPINDL

SEQ ID NO: 93 - protein, 1135 aa, Porphyromonas gingivalis
MNTVPASENKGQSRTVEDDPQYFGLYLNLARENLIEVESHVRIKFGKKKLNEESLKQSLLCDHLLSVDRWTKVYGHSRRYLPFLHYFDPDSQIEKDHDSKTGVDPDSAQRLIRELYSLLDFLRNDFSHNRLDGTTFEHLEVSPDISSFITGTYSLACGRAQSRFAVFFKPDDFVLAKNRKEQLISVADGKECLTVSGFAFFICLFLDREQASGMLSRIRGFKRTDENWARAVHETFCDLCIRHPHDRLESSNTKEALLLDMLNELNRCPRILYDMLPEEERAQFLPALDENSMNNLSENSLDEESRLLWDGSSDWAEALTKRIRHQDRFPYLMLRFIEEMDLLKGIRFRVDLGEIELDSYSKKVGRNGEYDRTITDHALAFGKLSDFQNEEEVSRMISGEASYPVRFSLFAPRYAIYDNKIGYCHTSDPVYPKSKTGEKRALSNPQSMGFISVHDLRKLLLMELLCEGSFSRMQSDFLRKANRILDETAEGKLQFSALFPEMRHRFIPPQNPKSKDRREKAETTLEKYKQEIKGRKDKLNSQLLSAFDMDQRQLPSRLLDEWMNIRPASHSVKLRTYVKQLNEDCRLRLRKFRKDGDGKARAIPLVGEMATFLSQDIVRMIISEETKKLITSAYYNEMQRSLAQYAGEENRRQFRAIVAELRLLDPSSGHPFLSATMETAHRYTEGFYKCYLEKKREWLAKIFYRPEQDENTKRRISVFFVPDGEARKLLPLLIRRRMKEQNDLQDWIRNKQAHPIDLPSHLFDSKVMELLKVKDGKKKWNEAFKDWWSTKYPDGMQPFYGLRRELNIHGKSVSYIPSDGKKFADCYTHLMEKTVRDKKRELRTAGKPVPPDLAADIKRSFHRAVNEREFMLRLVQEDDRLMLMAINKMMTDREEDILPGLKNIDSILDEENQFSLAVHAKVLEKEGEGGDNSLSLVPATIEIKSKRKDWSKYIRYRYDRRVPGLMSHFPEHKATLDEVKTLLGEYDRCRIKIFDWAFALEGAIMSDRDLKPYLHESSSREGKSGEHSTLVKMLVEKKGCLTPDESQYLILIRNKAAHNQFPCAAEMPLIYRDVSAKVGSIEGSSAKDLPEGSSLVDSLWKKYEMIIRKILPILDPENRFFGKLLNNMSQPINDL

SEQ ID NO: 94 - protein, 1135 aa, Porphyromonas gingivalis
MNTVPASENKGQSRTVEDDPQYFGLYLNLARENLIEVESHVRIKFGKKKLNEESLKQSLLCDHLLSVDRWTKVYGHSRRYLPFLHYFDPDSQIEKDHDSKTGVDPDSAQRLIRELYSLLDFLRNDFSHNRLDGTTFEHLEVSPDISSFITGTYSLACGRAQSRFADFFKPDDFVLAKNRKEQLISVADGKECLTVSGLAFFICLFLDREQASGMLSRIRGFKRTDENWARAVHETFCDLCIRHPHDRLESSNTKEALLLDMLNELNRCPRILYDMLPEEERAQFLPALDENSMNNLSENSLNEESRLLWDGSSDWAEALTKRIRHQDRFPYLMLRFIEEMDLLKGIRFRVDLGEIELDSYSKKVGRNGEYDRTITDHALAFGKLSDFQNEEEVSRMISGEASYPVRFSLFAPRYAIYDNKIGYCHTSDPVYPKSKTGEKRALSNPQSMGFISVHDLRKLLLMELLCEGSFSRMQSGFLRKANRILDETAEGKLQFSALFPEMRHRFIPPQNPKSKDRREKAETTLEKYKQEIKGRKDKLNSQLLSAFDMNQRQLPSRLLDEWMNIRPASHSVKLRTYVKQLNEDCRLRLRKFRKDGDGKARAIPLVGEMATFLSQDIVRMIISEETKKLITSAYYNEMQRSLAQYAGEENRRQFRAIVAELHLLDPSSGHPFLSATMETAHRYTEDFYKCYLEKKREWLAKTFYRPEQDENTKRRISVFFVPDGEARKLLPLLIRRRMKEQNDLQDWIRNKQAHPIDLPSHLFDSKIMELLKVKDGKKKWNEAFKDWWSTKYPDGMQPFYGLRRELNIHGKSVSYIPSDGKKFADCYTHLMEKTVQDKKRELRTAGKPVPPDLAADIKRSFHRAVNEREFMLRLVQEDDRLMLMAINKMMTDREEDILPGLKNIDSILDEENQFSLAVHAKVLEKEGEGGDNSLSLVPATIEIKSKRKDWSKYIRYRYDRRVPGLMSHFPEHKATLDEVKTLLGEYDRCRIKIFDWAFALEGAIMSDRDLKPYLHESSSREGKSGEHSTLVKMLVEKKGCLTPDESQYLILIRNKAAHNQFPCAAEMPLIYRDVSAKVGSIEGSSAKDLPEGSSLVDSLWKKYEMIIRKILPILDHENRFFGKLLNNMSQPINDL

SEQ ID NO: 95 - protein, 1135 aa, Porphyromonas gingivalis; identical to SEQ ID NO: 94

SEQ ID NO: 96 - protein, 1135 aa, Porphyromonas gingivalis
MNTVPASENKGQSRTVEDDPQYFGLYLNLARENLIEVESHVRIKFGKKKLNEESLKQSLLCDHLLSVDRWTKVYGHSRRYLPFLHYFDPDSQIEKDHDSKTGVDPDSAQRLIRELYSLLDFLRNDFSHNRLDGTTFEHLEVSPDISSFITGTYSLACGRAQSRFADFFKPDDFVLAKNRKEQLISVADGKECLTVSGLAFFICLFLDREQASGMLSRIRGFKRTDENWARAVHETFCDLCIRHPHDRLESSNTKEALLLDMLNELNRCPRILYDMLPEEERAQFLPALDENSMNNLSENSLNEESRLLWDGSSDWAEALTKRIRHQDRFPYLMLRFIEEMDLLKGIRFRVDLGEIELDSYSKKVGRNGEYDRTITDHALAFGKLSDFQNEEEVSRMISGEASYPVRFSLFAPRYAIYDNKIGYCHTSDPVYPKSKTGEKRALSNPRSMGFISVHDLRKLLLMELLCEGSFSRMQSDFLRKANRILDETAEGKLQFSALFPEMRHRFIPPQNPKSKDRREKAETTLEKYKQEIKGRKDKLNSQLLSAFDMNQRQLPSRLLDEWMNIRPASHSVKLRTYVKQLNEDCRLRLRKFRKDGDGKARAIPLVGEMATFLSQDIVRMIISEETKKLITSAYYNEMQRSLAQYAGEENRRQFRAIVAELHLLDPSSGHPFLSATMETAHRYTEDFYKCYLEKKREWLAKTFYRPEQDENTKRRISVFFVPDGEARKLLPLLIRRRMKEQNDLQDWIRNKQAHPIDLPSHLFDSKIMELLKVKDGKKKWNEAFKDWWSTKYPDGMQPFYGLRRELNIHGKSVSYIPSDGKKFADCYTHLMEKTVQDKKRELRTAGKPVPPDLAADIKRSFHRAVNEREFMLRLVQEDDRLMLMAINKMMTDREEDILPGLKNIDSILDEENQFSLAVHAKVLEKEGEGGDNSLSLVPATIEIKSKRKDWSKYIRYRYDRRVPGLMSHFPEHKATLDEVKTLLGEYDRCRIKIFDWAFALEGAIMSDRDLKPYLHESSSREGKSGEHSTLVKMLVEKKGCLTPDESQYLILIRNKAAHNQFPCAAEMPLIYRDVSAKVGSIEGSSAKDLPEGSSLVDSLWKKYEMIIRKILPILDPENRFFGKLLNNMSQPINDL

SEQ ID NO: 97 - protein, 1135 aa, Porphyromonas gingivalis
MNTVPASENKGQSRTVEDDPQYFGLYLNLARENLIEVESHVRIKFGKKKLNEESLKQSLLCDHLLSVDRWTKVYGHSRRYLPFLHYFDPDSQIEKDHDSKTGVDPDSAQRLIRELYSLLDFLRNDFSHNRLDGTTFEHLEVSPDISSFITGTYSLACGRAQSRFADFFKPDDFVLAKNRKEQLISVADGKECLTVSGLAFFICLFLDREQASGMLSRIRGFKRTDENWARAVHETFCDLCIRHPHDRLESSNTKEALLLDMLNELNRCPRILYDMLPEEERAQFLPALDENSMNNLSENSLNEESRLLWDGSSDWAEALTKRIRHQDRFPYLMLRFIEEMDLLKGIRFRVDLGEIELDSYSKKVGRNGEYDRTITDHALAFGKLSDFQNEEEVSRMISGEASYPVRFSLFAPRYAIYDNKIGYCHTSDPVYPKSKTGEKRALSNPRSMGFISVHDLRKLLLMELLCEGSFSRMQSDFLRKANRILDETAEGKLQFSALFPEMRHRFIPPQNPKSKDRREKAETTLEKYKQEIKGRKDKLNSQLLSAFDMDQRQLPSRLLDEWMNIRPASHSVKLRTYVKQLNEDCRLRLQKFRKDGDGKARAIPLVGEMATFLSQDIVRMIISEETKKLITSAYYNEMQRSLAQYAGEENRHQFRAIVAELRLLDPSSGHPFLSATMETAHRYTEDFYKCYLEKKREWLAKTFYRPEQDENTKRRISVFFVPDGEARKLLPLLIRRRMKEQNDLQDWIRNKQAHPIDLPSHLFDSKIMELLKVKDGKKKWNEAFKDWWSTKYPDGMQPFYGLRRELNIHGKSVSYIPSDGKKFADCYTHLMEKTVQDKKRELRTAGKPVPPDLAADIKRSFHRAVNEREFMLRLVQEDDRLMLMAINKMMTDREEDILPGLKNIDSILDEENQFSLAVHAKVLEKEGEGGDNSLSLVPATIEIKSKRKDWSKYIRYRYDRRVPGLMSHFPEHKATLDEVKTLLGEYDRCRIKIFDWAFALEGAIMSDRDLKPYLHESSSREGKSGEHSTLVKMLVEKKGCLTPDESQYLILIRNKAAHNQFPCAAEMPLIYRDVSAKVGSIEGSSAKDLPEGSSLVDSLWKKYEMIIRKILPILDPENRFFGKLLNNMSQPINDL

SEQ ID NO: 98 - protein, 1135 aa, Porphyromonas gingivalis
MNTVPASENKGQSRTVEDDPQYFGLYLNLARENLIEVESHVRIKFGKKKLNEESLKQSLLCDHLLSVDRWTKVYGHSRRYLPFLHYFDPDSQIEKDHDSKTGVDPDSAQRLIRELYSLLDFLRNDFSHNRLDGTTFEHLEVSPDISSFITGTYSLACGRAQSRFADFFKPDDFVLAKNRKEQLISVADGKECLTVSGLAFFICLFLDREQASGMLSRIRGFKRTDENWARAVHETFCDLCIRHPHDRLESSNTKEALLLDMLNELNRCPRILYDMLPEEERAQFLPALDENSMNNLSENSLNEESRLLWDGSSDWAEALTKRIRHQDRFPYLMLRFIEEMDLLKGIRFRVDLGEIELDSYSKKVGRNGEYDRTITDHALAFGKLSDFQNEEEVSRMISGEASYPVRFSLFAPRYAIYDNKIGYCHTSDPVYPKSKTGEKRALSNPRSMGFISVHDLRKLLLMELLCEGSFSRMQSDFLRKANRILDETAEGKLQFSALFPEMRHRFIPPQNPKSKDRREKAETTLEKYKQEIKGRKDKLNSQLLSAFDMDQRQLPSRLLDEWMNIRPASHSVKLRTYVKQLNEDCRLRLQKFRKDGDGKARAIPLVGEMATFLSQDIVRMIISEETKKLITSAYYNEMQRSLAQYAGEENRHQFRAIVAELRLLDPSSGHPFLSATMETAHRYTEDFYKCYLEKKREWLAKTFYRPEQDENTKRRISVFFVPDGEARKLLPLLIRRRMKEQNDLQDWIRNKQAHPIDLPSHLFDSKVMELLKVKDGKKKWNEAFKDWWSTKYPDGMQPFYGLRRELNIHGKSVSYIPSDGKKFADCYTHLMEKTVRDKKRELRTAGKPVPPDLAAYIKRSFHRAVNEREFMLRLVQEDDRLMLMAINKIMTDREEDILPGLKNIDSILDKENQFSLAVHAKVLEKEGEGGDNSLSLVPATIEIKSKRKDWSKYIRYRYDRRVPGLMSHFPEHKATLDEVKTLLGEYDRCRIKIFDWAFALEGAIMSDRDLKPYLHESSSREGKSGEHSTLVKMLVEKKGCLTPDESQYLILIRNKAAHNQFPCAAEIPLIYRDVSAKVGSIEGSSAKDLPEGSSLVDSLWKKYEMIIRKILPILDPENRFFGKLLNNMSQPINDL

SEQ ID NO: 99 - protein, 1135 aa, Porphyromonas gingivalis; identical to SEQ ID NO: 98

SEQ ID NO: 100 - protein, 1135 aa, Porphyromonas gingivalis; identical to SEQ ID NO: 97

SEQ ID NO: 101 - protein, 1135 aa, Porphyromonas gingivalis
MNTVPASENKGQSRTVEDDPQYFGLYLNLARENLIEVESHVRIKFGKKKLNEESLKQSLLCDHLLSVDRWTKVYGHSRRYLPFLHYFDPDSQIEKDHDSKTGVDPDSAQRLIRELYSLLDFLRNDFSHNRLDGTTFEHLEVSPDISSFITGTYSLACGRAQSRFADFFKPDDFVLAKNRKEQLISVADGKECLTVSGLAFFICLFLDREQASGMLSRIRGFKRTDENWARAVHETFCDLCIRHPHDRLESSNTKEALLLDMLNELNRCPRILYDMLPEEERAQFLPALDENSMNNLSENSLNEESRLLWDGSSDWAEALTKRIRHQDRFPYLMLRFIEEMDLLKGIRFRVDLGEIELDSYSKKVGRNGEYDRTITDHALAFGKLSDFQNEEEVSRMISGEASYPVRFSLFAPRYAIYDNKIGYCHTSDPVYPKSKTGEKRALSNPQSMGFISVHDLRKLLLMELLCEGSFSRMQSGFLRKANRILDETAEGKLQFSALFPEMRHRFIPPQNPKSKDRREKAETTLEKYKQEIKGRKDKLNSQLLSAFDMNQRQLPSRLLDEWMNIRPASHSVKLRTYVKQLNEDCRLRLRKFRKDGDGKARAIPLVGEMATFLSQDIVRMIISEETKKLITSAYYNEMQRSLAQYAGEENRRQFRAIVAELHLLDPSSGHPFLSATMETAHRYTEDFYKCYLEKKREWLAKTFYRPEQDENTKRRISVFFVPDGEARKLLPLLIRRRMKEQNDLQDWIRNKQAHPIDLPSHLFDSKIMELLKVKDGKKKWNEAFKDWWSTKYPDGMQPFYGLRRELNIHGKSVSYIPSDGKKFADCYTHLMEKTVQDKKRELRTAGKPVPPDLAADIKRSFHRAVNEREFMLRLVQEDDRLMLMAINKMMTDREEDILPGLKNIDSILDKENQFSLAVHAKVLEKEGEGGDNSLSLVPATIEIKSKRKDWSKYIRYRYDRRVPGLMSHFPEHKATLDEVKTLLGEYDRCRIKIFDWAFALEGAIMSDRDLKPYLHESSSREGKSGEHSTLVKMLVEKKGCLTPDESQYLILIRNKAAHNQFPCAAEMPLIYRDVSAKVGSIEGSSAKDLPEGSSLVDSLWKKYEMIIRKILPILDPENRFFGKLLNNMSQPINDL

SEQ ID NO: 102 - protein, 1135 aa, Porphyromonas gulae
MNTVPATENKGQSRTVEDDPQYFGLYLNLARENLIEVESHVRIKFGKKKLNEESLKQSLLCDHLLSIDRWTKVYGHSRRYLPFLHCFDPDSGIEKDHDSKTGVDPDSAQRLIRELYSLLDFLRNDFSHNRLDGTTFEHLKVSPDISSFITGAYTFACERAQSRFADFFKPDDFLLAKNRKEQLISVADGKECLTVSGFAFFICLFLDREQASGMLSRIRGFKRTDENWARAVHETFCDLCIRHPHDRLESSNTKEALLLDMLNELNRCPRILYDMLPEEERAQFLPALDENSMNNLSENSLNEESRLLWDGSSDWAEALTKRIRHQDRFPYLMLRFIEEMDLLKGIRFRVDLGEIELDSYSKKVGRNGEYDRTITDHALAFGKLSDFQNEEEVSRMISGEASYPVRFSLFAPRYAIYDNKIGYCHTSDPVYPKSKTGEKRALSNPQSMGFISVHDLRKLLLMELLCEGSFSRMQSDFLRKANRILDETAEGKLQFSALFPEMRHRFIPPQNPKSKDRREKAETTLEKYKQEIKGRKDKLNSQLLSAFDMNQRQLPSRLLDEWMNIRPASHSVKLRTYVKQLNEDCRLRLRKFRKDGDGKARAIPLVGEMATFLSQDIVRMIISEETKKLITSAYYNEMQRSLAQYAGEENRRQFRAIVAELHLLDPSSGHPFLSATMETAHRYTEDFYKCYLEKKREWLAKTFYRPEQDENTKRRISVFFVPDGEARKLLPLLIRRRMKEQNDLQDWIRNKQAHPIDLPSHLFDSKIMELLKVKDGKKKWNEAFKDWWSTKYPDGMQPFYGLRRELNIHGKSVSYIPSDGKKFADCYTHLMEKTVRDKKRELRTAGKPVPPDLAAYIKRSFHRAVNEREFMLRLVQEDDRLMLMAINKMMTDREEDILPGLKNIDSILDEENQFSLAVHAKVLEKEGEGGDNSLSLVPATIEIKSKRKDWSKYIRYRYDRRVPGLMSHFPEHKATLDEVKTLLGEYDRCRIKIFDWAFALEGAIMSDRDLKPYLHESSSREGKSGEHSTLVKMLVEKKGCLTPDESQYLILIRNKAAHNQFPCAAEMPLIYRDVSAKVGSIEGSSAKDLPEGSSLVDSLWKKYEMIIRKILPILDHENRFFGKLLNNMSQPINDL

SEQ ID NO: 103 - protein, 1115 aa, Bacteroides pyogenes
MESIKNSQKSTGKTLQKDPPYFGLYLNMALLNVRKVENHIRKWLGDVALLPEKSGFHSLLTTDNLSSAKWTRFYYKSRKFLPFLEMFDSDKKSYENRRETTECLDTIDRQKISSLLKEVYGKLQDIRNAFSHYHIDDQSVKHTALIISSEMHRFIENAYSFALQKTRARFTGVFVETDFLQAEEKGDNKKFFAIGGNEGIKLKDNALIFLICLFLDREEAFKFLSRATGFKSTKEKGFLAVRETFCALCCRQPHERLLSVNPREALLMDMLNELNRCPDILFEMLDEKDQKSFLPLLGEEEQAHILENSLNDELCEAIDDPFEMIASLSKRVRYKNRFPYLMLRYIEEKNLLPFIRFRIDLGCLELASYPKKMGEENNYERSVTDHAMAFGRLTDFHNEDAVLQQITKGITDEVRFSLYAPRYAIYNNKIGFVRTGGSDKISFPTLKKKGGEGHCVAYTLQNTKSFGFISIYDLRKILLLSFLDKDKAKNIVSGLLEQCEKHWKDLSENLFDAIRTELQKEFPVPLIRYTLPRSKGGKLVSSKLADKQEKYESEFERRKEKLTEILSEKDFDLSQIPRRMIDEWLNVLPTSREKKLKGYVETLKLDCRERLRVFEKREKGEHPVPPRIGEMATDLAKDIIRMVIDQGVKQRITSAYYSEIQRCLAQYAGDDNRRHLDSIIRELRLKDTKNGHPFLGKVLRPGLGHTEKLYQRYFEEKKEWLEATFYPAASPKRVPRFVNPPTGKQKELPLIIRNLMKERPEWRDWKQRKNSHPIDLPSQLFENEICRLLKDKIGKEPSGKLKWNEMFKLYWDKEFPNGMQRFYRCKRRVEVFDKVVEYEYSEEGGNYKKYYEALIDEVVRQKISSSKEKSKLQVEDLTLSVRRVFKRAINEKEYQLRLLCEDDRLLFMAVRDLYDWKEAQLDLDKIDNMLGEPVSVSQVIQLEGGQPDAVIKAECKLKDVSKLMRYCYDGRVKGLMPYFANHEATQEQVEMELRHYEDHRRRVFNWVFALEKSVLKNEKLRRFYEESQGGCEHRRCIDALRKASLVSEEEYEFLVHIRNKSAHNQFPDLEIGKLPPNVTSGFCECIWSKYKAIICRIIPFIDPERRFFGKLLEQK

SEQ ID NO: 104 - protein, 1115 aa, Bacteroides pyogenes
MESIKNSQKSTGKTLQKDPPYFGLYLNMALLNVRKVENHIRKWLGDVALLPEKSGFHSLLTTDNLSSAKWTRFYYKSRKFLPFLEMFDSDKKSYENRRETAECLDTIDRQKISSLLKEVYGKLQDIRNAFSHYHIDDQSVKHTALIISSEMHRFIENAYSFALQKTRARFTGVFVETDFLQAEEKGDNKKFFAIGGNEGIKLKDNALIFLICLFLDREEAFKFLSRATGFKSTKEKGFLAVRETFCALCCRQPHERLLSVNPREALLMDMLNELNRCPDILFEMLDEKDQKSFLPLLGEEEQAHILENSLNDELCEAIDDPFEMIASLSKRVRYKNRFPYLMLRYIEEKNLLPFIRFRIDLGCLELASYPKKMGEENNYERSVTDHAMAFGRLTDFHNEDAVLQQITKGITDEVRFSLYAPRYAIYNNKIGFVRTSGSDKISFPTLKKKGGEGHCVAYTLQNTKSFGFISIYDLRKILLLSFLDKDKAKNIVSGLLEQCEKHWKDLSENLFDAIRTELQKEFPVPLIRYTLPRSKGGKLVSSKLADKQEKYESEFERRKEKLTEILSEKDFDLSQIPRRMIDEWLNVLPTSREKKLKGYVETLKLDCRERLRVFEKREKGEHPLPPRIGEMATDLAKDIIRMVIDQGVKQRITSAYYSEIQRCLAQYAGDDNRRHLDSIIRELRLKDTKNGHPFLGKVLRPGLGHTEKLYQRYFEEKKEWLEATFYPAASPKRVPRFVNPPTGKQKELPLIIRNLMKERPEWRDWKQRKNSHPIDLPSQLFENEICRLLKDKIGKEPSGKLKWNEMFKLYWDKEFPNGMQRFYRCKRRVEVFDKVVEYEYSEEGGNYKKYYEALIDEVVRQKISSSKEKSKLQVEDLTLSVRRVFKRAINEKEYQLRLLCEDDRLLFMAVRDLYDWKEAQLDLDKIDNMLGEPVSVSQVIQLEGGQPDAVIKAECKLKDVSKLMRYCYDGRVKGLMPYFANHEATQEQVEMELRHYEDHRRRVFNWVFALEKSVLKNEKLRRFYEESQGGCEHRRCIDALRKASLVSEEEYEFLVHIRNKSAHNQFPDLEIGKLPPNVTSGFCECIWSKYKAIICRIIPFIDPERRFFGKLLEQK

SEQ ID NO: 105 - protein, 953 aa, Alistipes sp.
MSNEIGAFREHQFAYAPGNEKQEEATFATYFNLALSNVEGMMFGEVESNPDKIEKSLDTLPPAILRQIASFIWLSKEDHPDKAYSTEEVKVIVTDLVRRLCFYRNYFSHCFYLDTQYFYSDELVDTTAIGEKLPYNFHHFITNRLFRYSLPEITLFRWNEGERKYEILRDGLIFFCCLFLKRGQAERFLNELRFFKRTDEEGRIKRTIFTKYCTRESHKHIGIEEQDFLIFQDIIGDLNRVPKVCDGVVDLSKENERYIKNRETSNESDENKARYRLLIREKDKFPYYLMRYIVDFGVLPCITFKQNDYSTKEGRGQFHYQDAAVAQEERCYNFVVRNGNVYYSYMPQAQNVVRISELQGTISVEELRNMVYASINGKDVNKSVEQYLYHLHLLYEKILTISGQTIKEGRVDVEDYRPLLDKLLLRPASNGEELRRELRKLLPKRVCDLLSNRFDCSEGVSAVEKRLKAILLRHEQLLLSQNPALHIDKIKSVIDYLYLFFSDDEKFRQQPTEKAHRGLKDEEFQMYHYLVGDYDSHPLALWKELEASGRLKPEMRKLTSATSLHGLYMLCLKGTVEWCRKQLMSIGKGTAKVEAIADRVGLKLYDKLKEYTPEQLEREVKLVVMHGYAAAATPKPKAQAAIPSKLTELRFYSFLGKREMSFAAFIRQDKKAQKLWLRNFYTVENIKTLQKRQAAADAACKKLYNLVGEVERVHTNDKVLVLVAQRYRERLLNVGSKCAVTLDNPERQQKLADVYEVQNAWLSIRFDDLDFTLTHVNLSNLRKAYNLIPRKHILAFKEYLDNRVKQKLCEECRNVRRKEDLCTCCSPRYSNLTSWLKENHSESSIEREAATMMLLDVERKLLSFLLDERRKAIIEYGKFIPFSALVKECRLADAGLCGIRNDVLHDNVISYADAIGKLSAYFPKEASEAVEYIRRTKEVREQRREELMANSSQ

SEQ ID NO: 106 - protein, 1150 aa, Flavobacterium branchiophilum
MENLNKILDKENEICISKIFNTKGIAAPITEKALDNIKSKQKNDLNKEARLHYFSIGHSFKQIDTKKVFDYVLIEELKDEKPLKFITLQKDFFTKEFSIKLQKLINSIRNINNHYVHNFNDINLNKIDSNVFHFLKESFELAIIEKYYKVNKKYPLDNEIVLFLKELFIKDENTALLNYFTNLSKDEAIEYILTFTITENKIWNINNEHNILNIEKGKYLTFEAMLFLITIFLYKNEANHLLPKLYDFKNNKSKQELFTFFSKKFTSQDIDAEEGHLIKFRDMIQYLNHYPTAWNNDLKLESENKNKIMTTKLIDSIIEFELNSNYPSFATDIQFKKEAKAFLFASNKKRNQTSFSNKSYNEEIRHNPHIKQYRDEIASALTPISFNVKEDKFKIFVKKHVLEEYFPNSIGYEKFLEYNDFTEKEKEDFGLKLYSNPKTNKLIERIDNHKLVKSHGRNQDRFMDFSMRFLAENNYFGKDAFFKCYKFYDTQEQDEFLQSNENNDDVKFHKGKVTTYIKYEEHLKNYSYWDCPFVEENNSMSVKISIGSEEKILKIQRNLMIYFLENALYNENVENQGYKLVNNYYRELKKDVEESIASLDLIKSNPDFKSKYKKILPKRLLHNYAPAKQDKAPENAFETLLKKADFREEQYKKLLKKAEHEKNKEDFVKRNKGKQFKLHFIRKACQMMYFKEKYNTLKEGNAAFEKKDPVIEKRKNKEHEFGHHKNLNITREEFNDYCKWMFAFNGNDSYKKYLRDLFSEKHFFDNQEYKNLFESSVNLEAFYAKTKELFKKWIETNKPTNNENRYTLENYKNLILQKQVFINVYHFSKYLIDKNLLNSENNVIQYKSLENVEYLISDFYFQSKLSIDQYKTCGKLFNKLKSNKLEDCLLYEIAYNYIDKKNVHKIDIQKILTSKIILTINDANTPYKISVPFNKLERYTEMIAIKNQNNLKARFLIDLPLYLSKNKIKKGKDSAGYEIIIKNDLEIEDINTINNKIINDSVKFTEVLMELEKYFILKDKCILSKNYIDNSEIPSLKQFSKVWIKENENEIINYRNIACHFHLPLLETFDNLLLNVEQKFIKEELQNVSTINDLSKPQEYLILLFIKFKHNNFYLNLFNKNESKTIKNDKEVKKNRVLQKFINQVILKKK

SEQ ID NO: 107 - protein, 1322 aa, Prevotella sp.
MSKECKKQRQEKKRRLQKANFSISLTGKHVFGAYFNMARTNFVKTINYILPIAGVRGNYSENQINKMLHALFLIQAGRNEELTTEQKQWEKKLRLNPEQQTKFQKLLFKHFPVLGPMMADVADHKAYLNKKKSTVQTEDETFAMLKGVSLADCLDIICLMADTLTECRNFYTHKDPYNKPSQLADQYLHQEMIAKKLDKVVVASRRILKDREGLSVNEVEFLTGIDHLHQEVLKDEFGNAKVKDGKVMKTFVEYDDFYFKISGKRLVNGYTVTTKDDKPVNVNTMLPALSDFGLLYFCVLFLSKPYAKLFIDEVRLFEYSPFDDKENMIMSEMLSIYRIRTPRLHKIDSHDSKATLAMDIFGELRRCPMELYNLLDKNAGQPFFHDEVKHPNSHTPDVSKRLRYDDRFPTLALRYIDETELFKRIRFQLQLGSFRYKFYDKENCIDGRVRVRRIQKEINGYGRMQEVADKRMDKWGDLIQKREERSVKLEHEELYINLDQFLEDTADSTPYVTDRRPAYNIHANRIGLYWEDSQNPKQYKVFDENGMYIPELVVTEDKKAPIKMPAPRCALSVYDLPAMLFYEYLREQQDNEFPSAEQVIIEYEDDYRKFFKAVAEGKLKPFKRPKEFRDFLKKEYPKLRMADIPKKLQLFLCSHGLCYNNKPETVYERLDRLTLQHLEERELHIQNRLEHYQKDRDMIGNKDNQYGKKSFSDVRHGALARYLAQSMMEWQPTKLKDKEKGHDKLTGLNYNVLTAYLATYGHPQVPEEGFTPRTLEQVLINAHLIGGSNPHPFINKVLALGNRNIEELYLHYLEEELKHIRSRIQSLSSNPSDKALSALPFIHHDRMRYHERTSEEMMALAARYTTIQLPDGLFTPYILEILQKHYTENSDLQNALSQDVPVKLNPTCNAAYLITLFYQTVLKDNAQPFYLSDKTYTRNKDGEKAESFSFKRAYELFSVLNNNKKDTFPFEMIPLFLTSDEIQERLSAKLLDGDGNPVPEVGEKGKPATDSQGNTIWKRRIYSEVDDYAEKLTDRDMKISFKGEWEKLPRWKQDKIIKRRDETRRQMRDELLQRMPRYIRDIKDNERTLRRYKTQDMVLFLLAEKMFTNIISEQSSEFNWKQMRLSKVCNEAFLRQTLTFRVPVTVGETTIYVEQENMSLKNYGEFYRFLTDDRLMSLLNNIVETLKPNENGDLVIRHTDLMSELAAYDQYRSTIFMLIQSIENLIITNNAVLDDPDADGFWVREDLPKRNNFASLLELINQLNNVELTDDERKLLVAIRNAFSHNSYNIDFSLIKDVKHLPEVAKGILQHLQSMLGVEITK

SEQ ID NO: 108 - protein, 1159 aa, Myroides odoratimimus
MKDILTTDTTEKQNRFYSHKIADKYFFGGYFNLASNNIYEVFEEVNKRNTFGKLAKRDNGNLKNYIIHVFKDELSISDFEKRVAIFASYFPILETVDKKSIKERNRTIDLTLSQRIRQFREMLISLVTAVDQLRNFYTHYHHSDIVIENKVLDFLNSSFVSTALHVKDKYLKTDKTKEFLKETIAAELDILIEAYKKKQIEKKNTRFKANKREDILNAIYNEAFWSFINDKDKDKDKETVVAKGADAYFEKNHHKSNDPDFALNISEKGIVYLLSFFLTNKEMDSLKANLTGFKGKVDRESGNSIKYMATQRIYSFHTYRGLKQKIRTSEEGVKETLLMQMIDELSKVPNVVYQHLSTTQQNSFIEDWNEYYKDYEDDVETDDLSRVIHPVIRKRYEDRFNYFAIRFLDEFFDFPTLRFQVHLGDYVHDRRTKQLGKVESDRIIKEKVTVFARLKDINSAKASYFHSLEEQDKEELDNKWTLFPNPSYDFPKEHTLQHQGEQKNAGKIGIYVKLRDTQYKEKAALEEARKSLNPKERSATKASKYDIITQIIEANDNVKSEKPLVFTGQPIAYLSMNDIHSMLFSLLTDNAELKKTPEEVEAKLIDQIGKQINEILSKDTDTKILKKYKDNDLKETDTDKITRDLARDKEEIEKLILEQKQRADDYNYTSSTKFNIDKSRKRKHLLFNAEKGKIGVWLANDIKRFMFKESKSKWKGYQHTELQKLFAYFDTSKSDLELILSNMVMVKDYPIELIDLVKKSRTLVDFLNKYLEARLEYIENVITRVKNSIGTPQFKTVRKECFTFLKKSNYTVVSLDKQVERILSMPLFIERGFMDDKPTMLEGKSYKQHKEKFADWFVHYKENSNYQNFYDTEVYEITTEDKREKAKVTKKIKQQQKNDVFTLMMVNYMLEEVLKLSSNDRLSLNELYQTKEERIVNKQVAKDTQERNKNYIWNKVVDLQLCDGLVHIDNVKLKDIGNFRKYENDSRVKEFLTYQSDIVWSAYLSNEVDSNKLYVIERQLDNYESIRSKELLKEVQEIECSVYNQVANKESLKQSGNENFKQYVLQGLLPIGMDVREMLILSTDVKFKKEEIIQLGQAGEVEQDLYSLIYIRNKFAHNQLPIKEFFDFCENNYRSISDNEYYAEYYMEIFRSIKEKYAN

SEQ ID NO: 109 - protein, 1157 aa, Myroides odoratimimus
MKDILTTDTTEKQNRFYSHKIADKYFFGGYFNLASNNIYEVFEEVNKRNTFGKLAKRDNGNLKNYIIHVFKDELSISDFEKRVAIFASYFPILETVDKKSIKERNRTIDLTLSQRIRQFREMLISLVTAVDQLRNFYTHYHHSEIVIENKVLDFLNSSLVSTALHVKDKYLKTDKTKEFLKETIAAELDILIEAYKKKQIEKKNTRFKANKREDILNAIYNEAFWSFINDKDKDKETVVAKGADAYFEKNHHKSNDPDFALNISEKGIVYLLSFFLTNKEMDSLKANLTGFKGKVDRESGNSIKYMATQRIYSFHTYRGLKQKIRTSEEGVKETLLMQMIDELSKVPNVVYQHLSTTQQNSFIEDWNEYYKDYEDDVETDDLSRVIHPVIRKRYEDRFNYFAIRFLDEFFDFPTLRFQVHLGDYVHDRRTKQLGKVESDRIIKEKVTVFARLKDINSAKASYFHSLEEQDKEELDNKWTLFPNPSYDFPKEHTLQHQGEQKNAGKIGIYVKLRDTQYKEKAALEEARKSLNPKERSATKASKYDIITQIIEANDNVKSEKPLVFTGQPIAYLSMNDIHSMLFSLLTDNAELKKTPEEVEAKLIDQIGKQINEILSKDTDTKILKKYKDNDLKETDTDKITRDLARDKEEIEKLILEQKQRADDYNYTSSTKFNIDKSRKRKHLLFNAEKGKIGVWLANDIKRFMFKESKSKWKGYQHTELQKLFAYFDTSKSDLELILSDMVMVKDYPIELIDLVRKSRTLVDFLNKYLEARLGYIENVITRVKNSIGTPQFKTVRKECFAFLKESNYTVASLDKQIERILSMPLFIERGFMDSKPTMLEGKSYQQHKEDFADWFVHYKENSNYQNFYDTEVYEIITEDKREQAKVTKKIKQQQKNDVFTLMMVNYMLEEVLKLPSNDRLSLNELYQTKEERIVNKQVAKDTQERNKNYIWNKVVDLQLCEGLVRIDKVKLKDIGNFRKYENDSRVKEFLTYQSDIVWSGYLSNEVDSNKLYVIERQLDNYESIRSKELLKEVQEIECIVYNQVANKESLKQSGNENFKQYVLQGLLPRGTDVREMLILSTDVKFKKEEIMQLGQVREVEQDLYSLIYIRNKFAHNQLPIKEFFDFCENNYRPISDNEYYAEYYMEIFRSIKEKYAS

SEQ ID NO: 110 - protein, 1157 aa, Myroides odoratimimus; identical to SEQ ID NO: 109

SEQ ID NO: 111 - protein, 1157 aa, Myroides odoratimimus
MKDILTTDTTEKQNRFYSHKIADKYFFGGYFNLASNNIYEVFEEVNKRNTFGKLAKRDNGNLKNYIIHVFKDELSISDFEKRVAIFASYFPILETVDKKSIKERNRTIDLTLSQRIRQFREMLISLVTAVDQLRNFYTHYHHSEIVIENKVLDFLNSSLVSTALHVKDKYLKTDKTKEFLKETIAAELDILIEAYKKKQIEKKNTRFKANKREDILNAIYNEAFWSFINDKDKDKETVVAKGADAYFEKNHHKSNDPDFALNISEKGIVYLLSFFLTNKEMDSLKANLTGFKGKVDRESGNSIKYMATQRIYSFHTYRGLKQKIRTSEEGVKETLLMQMIDELSKVPNVVYQHLSTTQQNSFIEDWNEYYKDYEDDVETDDLSRVIHPVIRKRYEDRFNYFAIRFLDEFFDFPTLRFQVHLGDYVHDRRTKQLGKVESDRIIKEKVTVFARLKDINSAKANYFHSLEEQDKEELDNKWTLFPNPSYDFPKEHTLQHQGEQKNAGKIGIYVKLRDTQYKEKAALEEARKSLNPKERSATKASKYDIITQIIEANDNVKSEKPLVFTGQPIAYLSMNDIHSMLFSLLTDNAELKKTPEEVEAKLIDQIGKQINEILSKDTDTKILKKYKDNDLKETDTDKITRDLARDKEEIEKLILEQKQRADDYNYTSSTKFNIDKSRKRKHLLFNAEKGKIGVWLANDIKRFMTEEFKSKWKGYQHTELQKLFAYYDTSKSDLDLILSDMVMVKDYPIELIALVKKSRTLVDFLNKYLEARLGYMENVITRVKNSIGTPQFKTVRKECFTFLKKSNYTVVSLDKQVERILSMPLFIERGFMDDKPTMLEGKSYQQHKEKFADWFVHYKENSNYQNFYDTEVYEITTEDKREKAKVTKKIKQQQKNDVFTLMMVNYMLEEVLKLSSNDRLSLNELYQTKEERIVNKQVAKDTQERNKNYIWNKVVDLQLCEGLVRIDKVKLKDIGNFRKYENDSRVKEFLTYQSDIVWSAYLSNEVDSNKLYVIERQLDNYESIRSKELLKEVQEIECSVYNQVANKESLKQSGNENFKQYVLQGLVPIGMDVREMLILSTDVKFIKEEIIQLGQAGEVEQDLYSLIYIRNKFAHNQLPIKEFFDFCENNYRSISDNEYYAEYYMEIFRSIKEKYTS

SEQ ID NO: 112 - protein, 1157 aa, Myroides odoratimimus; identical to SEQ ID NO: 111

SEQ ID NO: 113 - protein, 1159 aa, Myroides odoratimimus
MKDILTTDTTEKQNRFYSHKIADKYFFGGYFNLASNNIYEVFEEVNKRNTFGKLAKRDNGNLKNYIIHVFKDELSISDFEKRVAIFASYFPILETVDKKSIKERNRTIDLTLSQRIRQFREMLISLVTAVDQLRNFYTHYHHSDIVIENKVLDFLNSSFVSTALHVKDKYLKTDKTKEFLKETIAAELDILIEAYKKKQIEKKNTRFKANKREDILNAIYNEAFWSFINDKDKDKDKETVVAKGADAYFEKNHHKSNDPDFALNISEKGIVYLLSFFLTNKEMDSLKANLTGFKGKVDRESGNSIKYMATQRIYSFHTYRGLKQKIRTSEEGVKETLLMQMIDELSKVPNVVYQHLSTTQQNSFIEDWNEYYKDYEDDVETDDLSRVTHPVIRKRYEDRFNYFAIRFLDEFFDFPTLRFQVHLGDYVHDRRTKQLGKVESDRIIKEKVTVFARLKDINSAKASYFHSLEEQDKEELDNKWTLFPNPSYDFPKEHTLQHQGEQKNAGKIGIYVKLRDTQYKEKAALEEARKSLNPKERSATKASKYDIITQIIEANDNVKSEKPLVFTGQPIAYLSMNDIHSMLFSLLTDNAELKKTPEEVEAKLIDQIGKQINEILSKDTDTKILKKYKDNDLKETDTDKITRDLARDKEEIEKLILEQKQRADDYNYTSSTKFNIDKSRKRKHLLFNAEKGKIGVWLANDIKRFMFKESKSKWKGYQHIELQKLFAYFDTSKSDLELILSNMVMVKDYPIELIDLVKKSRTLVDFLNKYLEARLEYIENVITRVKNSIGTPQFKTVRKECFTFLKKSNYTVVSLDKQVERILSMPLFIERGFMDDKPTMLEGKSYKQHKEKFADWFVHYKENSNYQNFYDTEVYEITTEDKREKAKVTKKIKQQQKNDVFTLMMVNYMLEEVLKLSSNDRLSLNELYQTKEERIVNKQVAKDTQERNKNYIWNKVVDLQLCDGLVHIDNVKLKDIGNFRKYENDSRVKEFLTYQSDIVWSAYLSNEVDSNKLYVIERQLDNYESIRSKELLKEVQEIECSVYNQVANKESLKQSGNENFKQYVLQGLLPIGMDVREMLILSTDVKFKKEEIIQLGQAGEVEQDLYSLIYIRNKFAHNQLPIKEFFDFCENNYRSISDNEYYAEYYMEIFRSIKEKYAN

SEQ ID NO: 114 - protein, 1224 aa, Bergeyella zoohelcum
MENKTSLGNNIYYNPFKPQDKSYFAGYFNAAMENTDSVFRELGKRLKGKEYTSENFFDAIFKENISLVEYERYVKLLSDYFPMARLLDKKEVPIKERKENFKKNFKGIIKAVRDLRNFYTHKEHGEVEITDEIFGVLDEMLKSTVLTVKKKKVKTDKTKEILKKSIEKQLDILCQKKLEYLRDTARKIEEKRRNQRERGEKELVAPFKYSDKRDDLIAAIYNDAFDVYIDKKKDSLKESSKAKYNTKSDPQQEEGDLKIPISKNGVVFLLSLFLTKQEIHAFKSKIAGFKATVIDEATVSEATVSHGKNSICFMATHEIFSHLAYKKLKRKVRTAEINYGEAENAEQLSVYAKETLMMQMLDELSKVPDVVYQNLSEDVQKTFIEDWNEYLKENNGDVGTMEEEQVIHPVIRKRYEDKFNYFAIRFLDEFAQFPTLRFQVHLGNYLHDSRPKENLISDRRIKEKITVFGRLSELEHKKALFIKNTETNEDREHYWEIFPNPNYDFPKENISVNDKDFPIAGSILDREKQPVAGKIGIKVKLLNQQYVSEVDKAVKAHQLKQRKASKPSIQNIIEEIVPINESNPKEAIVFGGQPTAYLSMNDIHSILYEFFDKWEKKKEKLEKKGEKELRKEIGKELEKKIVGKIQAQIQQIIDKDTNAKILKPYQDGNSTAIDKEKLIKDLKQEQNILQKLKDEQTVREKEYNDFIAYQDKNREINKVRDRNHKQYLKDNLKRKYPEAPARKEVLYYREKGKVAVWLANDIKRFMPTDFKNEWKGEQHSLLQKSLAYYEQCKEELKNLLPEKVFQHLPFKLGGYFQQKYLYQFYTCYLDKRLEYISGLVQQAENFKSENKVFKKVENECFKFLKKQNYTHKELDARVQSILGYPIFLERGFMDEKPTIIKGKTFKGNEALFADWFRYYKEYQNFQTFYDTENYPLVELEKKQADRKRKTKIYQQKKNDVFTLLMAKHIFKSVFKQDSIDQFSLEDLYQSREERLGNQERARQTGERNTNYIWNKTVDLKLCDGKITVENVKLKNVGDFIKYEYDQRVQAFLKYEENIEWQAFLIKESKEEENYPYVVEREIEQYEKVRREELLKEVHLIEEYILEKVKDKEILKKGDNQNFKYYILNGLLKQLKNEDVESYKVFNLNTEPEDVNINQLKQEATDLEQKAFVLTYIRNKFAHNQLPKKEFWDYCQEKYGKIEKEKTYAEYFAEVFKKEKEALIK

SEQ ID NO: 115 - protein, 1218 aa, Capnocytophaga cynodegmi
MENKTSLGNNIYYNPFKPQDKSYFAGYLNAAMENIDSVFRELGKRLKGKEYTSENFFDAIFKENISLVEYERYVKLLSDYFPMARLLDKKEVPIKERKENFKKNFRGIIKAVRDLRNFYTHKEHGEVEITDEIFGVLDEMLKSTVLTVKKKKIKTDKTKEILKKSIEKQLDILCQKKLEYLKDTARKIEEKRRNQRERGEKKLVPRFEYSDRRDDLIAAIYNDAFDVYIDKKKDSLKESSKTKYNTESYPQQEEGDLKIPISKNGVVFLLSLFLSKQEVHAFKSKIAGFKATVIDEATVSHRKNSICFMATHEIFSHLAYKKLKRKVRTAEINYSEAENAEQLSIYAKETLMMQMLDELSKVPDVVYQNLSEDVQKTFIEDWNEYLKENNGDVGTMEEEQVIHPVIRKRYEDKFNYFAIRFLDEFAQFPTLRFQVHLGNYLHDSRPKEHLISDRRIKEKITVFGRLSELEHKKALFIKNTETNEDRKHYWEVFPNPNYDFPKENISVNDKDFPIAGSILDREKQPTAGKIGIKVNLLNQKYISEVDKAVKAHQLKQRNNKPSIQNIIEEIVPINGSNPKEIIVFGGQPTAYLSMNDIHSILYEFFDKWEKKKEKLEKKGEKELRKEIGKELEEKIVGKIQTQIQQIIDKDINAKILKPYQDDDSTAIDKEKLIKDLKQEQKILQKLKNEQTAREKEYQECIAYQEESRKIKRSDKSRQKYLRNQLKRKYPEVPTRKEILYYQEKGKVAVWLANDIKRFMPTDFKNEWKGEQHSLLQKSLAYYEQCKEELKNLLPQQKVFKHLPFELGGHFQQKYLYQFYTRYLDKRLEHISGLVQQAENFKNENKVFKKVENECFKFLKKQNYTHKGLDAQAQSVLGYPIFLERGFMDEKPTIIKGKTFKGNESLFTDWFRYYKEYQNFQTFYDTENYPLVELEKKQADRKRETKIYQQKKNDVFTLLMAKHIFKSVFKQDSIDRFSLEDLYQSREERLENQEKAKQTGERNTNYIWNKTVDLNLCDGKVTVENVKLKNVGNFIKYEYDQRVQTFLKYEENIKWQAFLIKESKEEENYPYIVEREIEQYEKVRREELLKEVHLIEEYILEKVKDKEILKKGDNQNFKYYILNGLLKQLKNEDVESYKVFNLNTKPEDVNINQLKQEATDLEQKAFVLTYIRNKFAHNQLPKKEFWDYCQEKYGKIEKEKTYAEYFAEVFKREKEALMK

SEQ ID NO: 116 - protein, 1224 aa, Bergeyella zoohelcum; identical to SEQ ID NO: 114

SEQ ID NO: 117 - protein, 1155 aa, Flavobacterium sp.
MDNNITVEKTELGLGITYNHDKVEDKHYFGGFFNLAQNNIDLVAQEFKKRLLIQGKDSINIFANYFSDQCSITNLERGIKILAEYFPVVSYIDLDEKNKSKSIREHLILLLETINNLRNYYTHYYHKKIIIDGSLFPLLDTILLKVVLEIKKKKLKEDKTKQLLKKGLEKEMTILFNLMKAEQKEKKIKGWNIDENIKGAVLNRAFSHLLYNDELSDYRKSKYNTEDETLKDTLTESGILFLLSFFLNKKEQEQLKANIKGYKGKIASIPDEEITLKNNSLRNMATHWTYSHLTYKGLKHRIKTDHEKETLLVNMVDYLSKVPHEIYQNLSEQNKSLFLEDINEYMRDNEENHDSSEASRVIHPVIRKRYENKFAYFAIRFLDEFAEFPTLRFMVNVGNYIHDNRKKDIGGTSLITNRTIKQQINVFGNLTEIHKKKNDYFEKEENKEKTLEWELFPNPSYHFQKENIPIFIDLEKSKETNDLAKEYAKEKKKIFGSSRKKQQNTAKKNRETIINLVFDKYKTSDRKTVTFEQPTALLSFNELNSFLYAFLVENKTGKELEKIIIEKIANQYQILKNCSSTVDKTNDNIPKSIKKIVNTTTDSFYFEGKKIDIEKLEKDITIEIEKTNEKLETIKENEESAQNYKRNERNTQKRKLYRKYVFFTNEIGIEATWITNDILRFLDNKENWKGYQHSELQKFISQYDNYKKEALGLLESEWNLESDAFFGQNLKRMFQSNSTFETFYKKYLDNRKNTLETYLSAIENLKTMTDVRPKVLKKKWTELFRFFDKKIYLLSTIETKINELITKPINLSRGIFEEKPTFINGKNPNKENNQHLFANWFIYAKKQTILQDFYNLPLEQPKAITNLKKHKYKLERSINNLKIEDIYIKQMVDFLYQKLFEQSFIGSLQDLYTSKEKREIEKGKAKNEQTPDESFIWKKQVEINTHNGRIIAKTKIKDIGKFKNLLTDNKIAHLISYDDRIWDFSLNNDGDITKKLYSINTELESYETIRREKLLKQIQQFEQFLLEQETEYSAERKHPEKFEKDCNPNFKKYIIEGVLNKIIPNHEIEEIEILKSKEDVFKINFSDILILNNDNIKKGYLLIMIRNKFAHNQLIDKNLFNFSLQLYSKNENENFSEYLNKVCQNIIQEFKEKLK

SEQ ID NO: 118 - protein, 1145 aa, Psychroflexus torquis
MESIIGLGLSFNPYKTADKHYFGSFLNLVENNLNAVFAEFKERISYKAKDENISSLIEKHFIDNMSIVDYEKKISILNGYLPIIDFLDDELENNLNTRVKNFKKNFIILAEAIEKLRDYYTHFYHDPITFEDNKEPLLELLDEVLLKTILDVKKKYLKTDKTKEILKDSLREEMDLLVIRKTDELREKKKTNPKIQHTDSSQIKNSIFNDAFQGLLYEDKGNNKKTQVSHRAKTRLNPKDIHKQEERDFEIPLSTSGLVFLMSLFLSKKEIEDFKSNIKGFKGKVVKDENHNSLKYMATHRVYSILAFKGLKYRIKTDTFSKETLMMQMIDELSKVPDCVYQNLSETKQKDFIEDWNEYFKDNEENTENLENSRVVHPVIRKRYEDKFNYFAIRFLDEFANFKTLKFQVFMGYYIHDQRTKTIGTTNITTERTVKEKINVFGKLSKMDNLKKHFFSQLSDDENTDWEFFPNPSYNFLTQADNSPANNIPIYLELKNQQIIKEKDAIKAEVNQTQNRNPNKPSKRDLLNKILKTYEDFHQGDPTAILSLNEIPALLHLFLVKPNNKTGQQIENIIRIKIEKQFKAINHPSKNNKGIPKSLFADTNVRVNAIKLKKDLEAELDMLNKKHIAFKENQKASSNYDKLLKEHQFTPKNKRPELRKYVFYKSEKGEEATWLANDIKRFMPKDFKTKWKGCQHSELQRKLAFYDRHTKQDIKELLSGCEFDHSLLDINAYFQKDNFEDFFSKYLENRIETLEGVLKKLHDFKNEPTPLKGVFKNCFKFLKRQNYVTESPEIIKKRILAKPTFLPRGVFDERPTMKKGKNPLKDKNEFAEWFVEYLENKDYQKFYNAEEYRMRDADFKKNAVIKKQKLKDFYTLQMVNYLLKEVFGKDEMNLQLSELFQTRQERLKLQGIAKKQMNKETGDSSENTRNQTYIWNKDVPVSFFNGKVTIDKVKLKNIGKYKRYERDERVKTFIGYEVDEKWMMYLPHNWKDRYSVKPINVIDLQIQEYEEIRSHELLKEIQNLEQYIYDHTTDKNILLQDGNPNFKMYVLNGLLIGIKQVNIPDFIVLKQNTNFDKIDFTGIASCSELEKKTIILIAIRNKFAHNQLPNKMIYDLANEFLKIEKNETYANYYLKVLKKMISDLA

SEQ ID NO: 119 - protein, 1179 aa, Flavobacterium columnare
MSSKNESYNKQKTFNHYKQEDKYFFGGFLNNADDNLRQVGKEFKTRINFNHNNNELASVFKDYFNKEKSVAKREHALNLLSNYFPVLERIQKHTNHNFEQTREIFELLLDTIKKLRDYYTHHYHKPITINPKIYDFLDDTLLDVLITIKKKKVKNDTSRELLKEKLRPELTQLKNQKREELIKKGKKLLEENLENAVFNHCLRPFLEENKTDDKQNKTVSLRKYRKSKPNEETSITLTQSGLVFLMSFFLHRKEFQVFTSGLEGFKAKVNTIKEEEISLNKNNIVYMITHWSYSYYNFKGLKHRIKTDQGVSTLEQNNTTHSLTNTNTKEALLTQIVDYLSKVPNEIYETLSEKQQKEFEEDINEYMRENPENEDSTFSSIVSHKVIRKRYENKFNYFAMRFLDEYAELPTLRFMVNFGDYIKDRQKKILESIQFDSERIIKKEIHLFEKLSLVTEYKKNVYLKETSNIDLSRFPLFPNPSYVMANNNIPFYIDSRSNNLDEYLNQKKKAQSQNKKRNLTFEKYNKEQSKDAIIAMLQKEIGVKDLQQRSTIGLLSCNELPSMLYEVIVKDIKGAELENKIAQKIREQYQSIRDFTLDSPQKDNIPTTLIKTINTDSSVTFENQPIDIPRLKNAIQKELTLTQEKLLNVKEHEIEVDNYNRNKNTYKFKNQPKNKVDDKKLQRKYVFYRNEIRQEANWLASDLIHFMKNKSLWKGYMHNELQSFLAFFEDKKNDCIALLETVFNLKEDCILTKGLKNLFLKHGNFIDFYKEYLKLKEDFLNTESTFLENGLIGLPPKILKKELSKRFKYIFIVFQKRQFIIKELEEKKNNLYADAINLSRGIFDEKPTMIPFKKPNPDEFASWFVASYQYNNYQSFYELTPDIVERDKKKKYKNLRAINKVKIQDYYLKLMVDTLYQDLFNQPLDKSLSDFYVSKAEREKIKADAKAYQKRNDSSLWNKVIHLSLQNNRITANPKLKDIGKYKRALQDEKIATLLTYDDRTWTYALQKPEKENENDYKELHYTALNMELQEYEKVRSKELLKQVQELEKQILEEYTDFLSTQIHPADFEREGNPNFKKYLAHSILENEDDLDKLPEKVEAMRELDETITNPIIKKAIVLIIIRNKMAHNQYPPKFIYDLANRFVPKKEEEYFATYFNRVFETITKELWENKEKKDKTQV

SEQ ID NO: 120 - protein, 1213 aa, Flavobacterium columnare
MSSKNESYNKQKTFNHYKQEDKYFFGGFLNNADDNLRQVGKEFKTRINFNHNNNELASVFKDYFNKEKSVAKREHALNLLSNYFPVLERIQKHTNHNFEQTREIFELLLDTIKKLRDYYTHHYHKPITINPKVYDFLDDTLLDVLITIKKKKVKNDTSRELLKEKFRPELTQLKNQKREELIKKGKKLLEENLENAVFNHCLRPFLEENKTDDKQNKTVSLRKYRKSKPNEETSITLTQSGLVFLISFFLHRKEFQVFTSGLEGFKAKVNTIKEEEISLNKNNIVYMITHWSYSYYNFKGLKHRIKTDQGVSTLEQNNTTHSLTNTNTKEALLTQIVDYLSKVPNEIYETLSEKQQKEFEEDINEYMRENPENEDSTFSSIVSHKVIRKRYENKFNYFAMRFLDEYAELPTLRFMVNFGDYIKDRQKKILESIQFDSERIIKKEIHLFEKLGLVTEYKKNVYLKETSNIDLSRFPLFPSPSYVMANNNIPFYIDSRSNNLDEYLNQKKKAQSQNRKRNLTFEKYNKEQSKDAIIAMLQKEIGVKDLQQRSTIGLLSCNELPSMLYEVIVKDIKGAELENKIAQKIREQYQSIRDFTLDSPQKDNIPTTLTKTISTDTSVTFENQPIDIPRLKNALQKELTLTQEKLLNVKQHEIEVDNYNRNKNTYKFKNQPKDKVDDNKLQRKYVFYRNEIGQEANWLASDLIHFMKNKSLWKGYMHNELQSFLAFFEDKKNDCIALLETVFNLKEDCILTKDLKNLFLKHGNFIDFYKEYLKLKEDFLNTESTFLENGFIGLPPKILKKELSKRLNYIFIVFQKRQFIIKELEEKKNNLYADAINLSRGIFDEKPTMIPFKKPNPDEFASWFVASYQYNNYQSFYELTPDKIENDKKKKYKNLRAINKVKIQDYYLKLMVDTLYQDLFNQPLDKSLSDFYVSKTDREKIKADAKAYQKRNDSFLWNKVIHLSLQNNRITANPKLKDIGKYKRALQDEKIATLLTYDDRTWTYALQKPEKENENDYKELHYTALNMELQEYEKVRSKKLLKQVQELEKQILDKFYDFSNNATHPEDLEIEDKKGKRHPNFKLYITKALLKNESEIINLENIDIEILIKYYDYNTEKLKEKIKNMDEDEKAKIVNTKENYNKITNVLIKKALVLIIIRNKMAHNQYPPKFIYDLATRFVPKKEEEYFACYFNRVFETITTELWENKKKAKEIV

SEQ ID NO: 121 - protein, 1213 aa, Flavobacterium columnare
MSSKNESYNKQKTFNHYKQEDKYFFGGFLNNADDNLRQVGKEFKTRINFNHNNNELASVFKDYFNKEKSVAKREHALNLLSNYFPVLERIQKHTNHNFEQTREIFELLLDTIKKLRDYYTHHYHKPITINPKIYDFLDDTLLDVLITIKKKKVKNDTSRELLKEKLRPELTQLKNQKREELIKKGKKLLEENLENAVFNHCLRPFLEENKTDDKQNKTVSLRKYRKSKPNEETSITLTQSGLVFLMSFFLHRKEFQVFTSGLEGFKAKVNTIKEEKISLNKNNIVYMITHWSYSYYNFKGLKHRIKTDQGVSTLEQNNTTHSLTNTNTKEALLTQIVDYLSKVPNEIYETLSEKQQKEFEEDINEYMRENPENEDSTFSSIVSHKVIRKRYENKFNYFAMRFLDEYAELPTLRFMVNFGDYIKDRQKKILESIQFDSERIIKKEIHLFEKLGLVTEYKKNVYLKETSNIDLSRFPLFPSPSYVMANNNIPFYIDSRSNNLDEYLNQKKKAQSQNRKRNLTFEKYNKEQSKDAIIAMLQKEIGVKDLQQRSTIGLLSCNELPSMLYEVIVKDIKGAELENKIAQKIREQYQSIRDFTLNSPQKDNIPTTLIKTISTDTSVTFENQPIDIPRLKNAIQKELALTQEKLLNVKQHEIEVNNYNRNKNTYKFKNQPKDKVDDNKLQRKYVFYRNEIGQEANWLASDLIHFMKNKSLWKGYMHNELQSFLAFFEDKKNDCIALLETVFNLKEDCILTKDLKNLFLKHGNFIDFYKEYLKLKEDFLNTESTFLENGFIGLPPKILKKELSKRLNYIFIVFQKRQFIIKELEEKKNNLYADAINLSRGIFDEKPTMIPFKKPNPDEFASWFVASYQYNNYQSFYELTPDKIENDKKKKYKNLRAINKVKIQDYYLKLMVDTLYQDLFNQPLDKSLSDFYVSKTDREKIKADAKAYQKRNDSFLWNKVIHLSLQNNRITANPKLKDIGKYKRALQDEKIATLLTYDDRTWTYALQKPEKENENDYKELHYTALNMELQEYEKVRSKKLLKQVQELEKQILDKFYDFSNNATHPEDLEIEDKKGKRHPNFKLYITKALLKNESEIINLENIDIEILIKYYDYNTEKLKEKIKNMDEDEKAKIVNTKENYNKITNVLIKKALVLIIIRNKMAHNQYPPKFIYDLATRFVPKKEEEYFACYFNRVFETITTELWENKKKAKEIV

SEQ ID NO: 122 - protein, 1214 aa, Flavobacterium columnare
MSSKNESYNKQKTFNHYKQEDKYFFGGFLNNADDNLRQVGKEFKTRINFNHNNNELASVFKDYFNKEKSVAKREHALNLLSNYFPVLERIQKHTNHNFEQTREIFELLLDTIKKLRDYYTHHYHKPITINPKIYDFLDDTLLDVLITIKKKKVKNDTSRELLKEKLRPELTQLKNQKREELIKKGKKLLEENLENAVFNHCLIPFLEENKTDDKQNKTVSLRKYRKSKPNEETSITLTQSGLVFLMSFFLHRKEFQVFTSGLERFKAKVNTIKEEEISLNKNNIVYMITHWSYSYYNFKGLKHRIKTDQGVSTLEQNNTTHSLTNTNTKEALLTQIVDYLSKVPNEIYETLSEKQQKEFEEDINEYMRENPENEDSTFSSIVSHKVIRKRYENKFNYFAMRFLDEYAELPTLRFMVNFGDYIKDRQKKILESIQFDSERIIKKEIHLFEKLSLVTEYKKNVYLKETSNIDLSRFPLFPNPSYVMANNNIPFYIDSRSNNLDEYLNQKKKAQSQNKKRNLTFEKYNKEQSKDAIIAMLQKEIGVKDLQQRSTIGLLSCNELPSMLYEVIVKDIKGAELENKIAQKIREQYQSIRDFTLDSPQKDNIPTTLIKTINTDSSVTFENQPIDIPRLKNALQKELTLTQEKLLNVKEHEIEVDNYNRNKNTYKFKNQPKNKVDDKKLQRKYVFYRNEIRQEANWLASDLIHFMKNKSLWKGYMHNELQSFLAFFEDKKNDCIALLETVFNLKEDCILTKGLKNLFLKHGNFIDFYKEYLKLKEDFLSTESTFLENGFIGLPPKILKKELSKRLKYIFIVFQKRQFIIKELEEKKNNLYADAINLSRGIFDEKPTMIPFKKPNPDEFASWFVASYQYNNYQSFYELTPDIVERDKKKKYKNLRAINKVKIQDYYLKLMVDTLYQDLFNQPLDKSLSDFYVSKAEREKIKADAKAYQKLNDSSLWNKVIHLSLQNNRITANPKLKDIGKYKRALQDEKIATLLTYDARTWTYALQKPEKENENDYKELHYTALNMELQEYEKVRSKELLKQVQELEKKILDKFYDFSNNASHPEDLEIEDKKGKRHPNFKLYITKALLKNESEIINLENIDIEILLKYYDYNTEELKEKIKNMDEDEKAKIINTKENYNKITNVLIKKALVLIIIRNKMAHNQYPPKFIYDLANRFVPKKEEEYFATYFNRVFETITKELWENKEKKDKTQV

SEQ ID NO: 123 - protein, 1145 aa, Chryseobacterium sp.
METQTIGHGIAYDHSKIQDKHFFGGFLNLAENNIKAVLKAFSEKFNVGNVDVKQFADVSLKDNLPDNDFQKRVSFLKMYFPVVDFINIPNNRAKFRSDLTTLFKSVDQLRNFYTHYYHKPLDFDASLFILLDDIFARTAKEVRDQKMKDDKTRQLLSKSLSEELQKGYELQLERLKELNRLGKKVNIHDQLGIKNGVLNNAFNHLIYKDGESFKTKLTYSSALTSFESAENGIEISQSGLLFLLSMFLKRKEIEDLKNRNKGFKAKVVIDEDGKVNGLKFMATHWVFSYLCFKGLKSKLSTEFHEETLLIQIIDELSKVPDELYCAFDKETRDKFIEDINEYVKEGHQDFSLEDAKVIHPVIRKRYENKFNYFAIRFLDEFVKFPSLRFQVHVGNYVHDRRIKNIDGTTFETERVVKDRIKVFGRLSEISSYKAQYLSSVSDKHDETGWEIFPNPSYVFINNNIPIHISVDTSFKKEIADFKKLRRAQVPDELKIRGAEKKRKFEITQMIGSKSVLNQEEPIALLSLNEIPALLYEILINGKEPAEIERIIKDKLNERQDVIKNYNPENWLPASQISRRLRSNKGERIINTDKLLQLVTKELLVTEQKLKIISDNREALKQKKEGKYIRKFIFTNSELGREAIWLADDIKRFMPADVRKEWKGYQHSQLQQSLAFYNSRPKEALAILESSWNLKDEKIIWNEWILKSFTQNKFFDAFYNEYLKGRKKYFAFLSEHIVQYTSNAKNLQKFIKQQMPKDLFEKRHYIIEDLQTEKNKILSKPFIFPRGIFDKKPTFIKGVKVEDSPESFANWYQYGYQKDHQFQKFYDWKRDYSDVFLEHLGKPFINNGDRRTLGMEELKERIIIKQDLKIKKIKIQDLFLRLIAENLFQKVFKYSAKLPLSDFYLTQEERMEKENMAALQNVREEGDKSPNIIKDNFIWSKMIPYKKGQIIENAVKLKDIGKLNVLSLDDKVQTLLSYDDAKPWSKIALENEFSIGENSYEVIRREKLFKEIQQFESEILFRSGWDGINHPAQLEDNRNPKFKMYIVNGILRKSAGLYSQGEDIWFEYNADFNNLDADVLETKSELVQLAFLVTAIRNKFAHNQLPAKEFYFYIRAKYGFADEPSVALVYLNFTKYAINEFKKVMI

SEQ ID NO: 124 - protein, 1095 aa, Riemerella anatipestifer
MEKPLLPNVYTLKHKFFWGAFLNIARHNAFITICHINEQLGLKTPSNDDKIVDVVCETWNNILNNDHDLLKKSQLTELILKHFPFLTAMCYHPPKKEGKKKGHQKEQQKEKESEAQSQAEALNPSKLIEALEILVNQLHSLRNYYSHYKHKKPDAEKDIFKHLYKAFDASLRMVKEDYKAHFTVNLTRDFAHLNRKGKNKQDNPDFNRYRFEKDGFFTESGLLFFTNLFLDKRDAYWMLKKVSGFKASHKQREKMTTEVFCRSRILLPKLRLESRYDHNQMLLDMLSELSRCPKLLYEKLSEENKKHFQVEADGFLDEIEEEQNPFKDTLIRHQDRFPYFALRYLDLNESFKSIRFQVDLGTYHYCIYDKKIGDEQEKRHLTRTLLSFGRLQDFTEINRPQEWKALTKDLDYKETSNQPFISKTTPHYHITDNKIGFRLGTSKELYPSLEIKDGANRIAKYPYNSGFVAHAFISVHELLPLMFYQHLTGKSEDLLKETVRHIQRIYKDFEEERINTIEDLEKANQGRLPLGAFPKQMLGLLQNKQPDLSEKAKIKIEKLIAETKLLSHRLNTKLKSSPKLGKRREKLIKTGVLADWLVKDFMRFQPVAYDAQNQPIKSSKANSTEFWFIRRALALYGGEKNRLEGYFKQTNLIGNTNPHPFLNKFNWKACRNLVDFYQQYLEQREKFLEAIKNQPWEPYQYCLLLKIPKENRKNLVKGWEQGGISLPRGLFTEAIRETLSEDLMLSKPIRKEIKKHGRVGFISRAITLYFKEKYQDKHQSFYNLSYKLEAKAPLLKREEHYEYWQQNKPQSPTESQRLELHTSDRWKDYLLYKRWQHLEKKLRLYRNQDVMLWLMTLELTKNHFKELNLNYHQLKLENLAVNVQEADAKLNPLNQTLPMVLPVKVYPATAFGEVQYHKTPIRTVYIREEHTKALKMGNFKALVKDRRLNGLFSFIKEENDTQKHPISQLRLRRELEIYQSLRVDAFKETLSLEEKLLNKHTSLSSLENEFRALLEEWKKEYAASSMVTDEHIAFIASVRNAFCHNQYPFYKEALHAPIPLFTVAQPTTEEKDGLGIAEALLKVLREYCEIVKSQI

SEQ ID NO: 125 - protein, 948 aa, Riemerella anatipestifer
MFFSFHNAQRVIFKHLYKAFDASLRMVKEDYKAHFTVNLTRDFAHLNRKGKNKQDNPDFNRYRFEKDGFFTESGLLFFTNLFLDKRDAYWMLKKVSGFKASHKQREKMTTEVFCRSRILLPKLRLESRYDHNQMLLDMLSELSRCPKLLYEKLSEENKKHFQVEADGFLDEIEEEQNPFKDTLIRHQDRFPYFALRYLDLNESFKSIRFQVDLGTYHYCIYDKKIGDEQEKRHLTRTLLSFGRLQDFTEINRPQEWKALTKDLDYKETSNQPFISKTTPHYHITDNKIGFRLGTSKELYPSLEIKDGANRIAKYPYNSGFVAHAFISVHELLPLMFYQHLTGKSEDLLKETVRHIQRIYKDFEEERINTIEDLEKANQGRLPLGAFPKQMLGLLQNKQPDLSEKAKIKIEKLIAETKLLSHRLNTKLKSSPKLGKRREKLIKTGVLADWLVKDFMRFQPVAYDAQNQPIKSSKANSTEFWFIRRALALYGGEKNRLEGYFKQTNLIGNTNPHPFLNKFNWKACRNLVDFYQQYLEQREKFLEAIKHQPWEPYQYCLLLKVPKENRKNLVKGWEQGGISLPRGLFTEAIRETLSKDLTLSKPIRKEIKKHGRVGFISRAITLYFKEKYQDKHQSFYNLSYKLEAKAPLLKKEEHYEYWQQNKPQSPTESQRLELHTSDRWKDYLLYKRWQHLEKKLRLYRNQDIMLWLMTLELTKNHFKELNLNYHQLKLENLAVNVQEADAKLNPLNQTLPMVLPVKVYPTTAFGEVQYHETPIRTVYIREEQTKALKMGNFKALVKDRRLNGLFSFIKEENDTQKHPISQLRLRRELEIYQSLRVDAFKETLSLEEKLLNKHASLSSLENEFRTLLEEWKKKYAASSMVTDKHIAFIASVRNAFCHNQYPFYKETLHAPILLFTVAQPTTEEKDGLGIAEALLKVLREYCEIVKSQI

SEQ ID NO: 126 - protein, 948 aa, Riemerella anatipestifer
MFFSFHNAQRVIFKHLYKAFDASLRMVKEDYKAHFTVNLTRDFAHLNRKGKNKQDNPDFNRYRFEKDGFFTESGLLFFTNLFLDKRDAYWMLKKVSGFKASHKQREKMTTEVFCRSRILLPKLRLESRYDHNQMLLDMLSELSRCPKLLYEKLSEENKKHFQVEADGFLDEIEEEQNPFKDTLIRHQDRFPYFALRYLDLNESFKSIRFQVDLGTYHYCIYDKKIGDEQEKRHLTRTLLSFGRLQDFTEINRPQEWKALTKDLDYKETSNQPFISKTTPHYHITDNKIGFRLGTSKELYPSLEIKDGANRIAKYPYNSGFVAHAFISVHELLPLMFYQHLTGKSEDLLKETVRHIQRIYKDFEEERINTIEDLEKANQGRLPLGAFPKQMLGLLQNKQPDLSEKAKIKIEKLIAETKLLSHRLNTKLKSSPKLGKRREKLIKTGVLADWLVKDFMRFQPVAYDAQNQPIKSSKANSTEFWFIRRALALYGGEKNRLEGYFKQTNLIGNTNPHPFLNKFNWKACRNLVDFYQQYLEQREKFLEAIKNQPWEPYQYCLLLKIPKENRKNLVKGWEQGGISLPRGLFTEAIRETLSEDLMLSKPIRKEIKKHGRVGFISRAITLYFKEKYQDKHQSFYNLSYKLEAKAPLLKREEHYEYWQQNKPQSPTESQRLELHTSDRWKDYLLYKRWQHLEKKLRLYRNQDVMLWLMTLELTKNHFKELNLNYHQLKLENLAVNVQEADAKLNPLNQTLPMVLPVKVYPATAFGEVQYHKTPIRTVYIREEHTKALKMGNFKALVKDRRLNGLFSFIKEENDTQKHPISQLRLRRELEIYQSLRVDAFKETLSLEEKLLNKHTSLSSLENEFRALLEEWKKEYAASSMVTDEHIAFIASVRNAFCHNQYPFYKEALHAPIPLFTVAQPTTEEKDGLGIAEALLKVLREYCEIVKSQI

SEQ ID NO: 127 - protein, 950 aa, Riemerella anatipestifer
MFFSFHNAQRVIFKHLYKAFDASLRMVKEDYKAHFTVNLTRDFAHLNRKGKNKQDNPDFNRYRFEKDGFFTESGLLFFTNLFLDKRDAYWMLKKVSGFKASHKQSEKMTTEVFCRSRILLPKLRLESRYDHNQMLLDMLSELSRCPKLLYEKLSEKDKKCFQVEADGFLDEIEEEQNPFKDTLIRHQDRFPYFALRYLDLNESFKSIRFQVDLGTYHYCIYDKKIGYEQEKRHLTRTLLNFGRLQDFTEINRPQEWKALTKDLDYNETSNQPFISKTTPHYHITDNKIGFRLRTSKELYPSLEVKDGANRIAKYPYNSDFVAHAFISISVHELLPLMFYQHLTGKSEDLLKETVRHIQRIYKDFEEERINTIEDLEKANQGRLPLGAFPKQMLGLLQNKQPDLSEKAKIKIEKLIAETKLLSHRLNTKLKSSPKLGKRREKLIKTGVLADWLVKDFMRFQPVVYDAQNQPIKSSKANSTESRLIRRALALYGGEKNRLEGYFKQTNLIGNTNPHPFLNKFNWKACRNLVDFYQQYLEQREKFLEAIKHQPWEPYQYCLLLKVPKENRKNLVKGWEQGGISLPRGLFTEAIRETLSKDLTLSKPIRKEIKKHGRVGFISRAITLYFKEKYQDKHQSFYNLSYKLEAKAPLLKKEEHYEYWQQNKPQSPTESQRLELHTSDRWKDYLLYKRWQHLEKKLRLYRNQDIMLWLMTLELTKNHFKELNLNYHQLKLENLAVNVQEADAKLNPLNQTLPMVLPVKVYPTTAFGEVQYHETPIRTVYIREEQTKALKMGNFKALVKDRHLNGLFSFIKEENDTQKHPISQLRLRRELEIYQSLRVDAFKETLSLEEKLLNKHASLSSLENEFRTLLEEWKKKYAASSMVTDKHIAFIASVRNAFCHNQYPFYKETLHAPILLFTVAQPTTEEKDGLGIAEALLRVLREYCEIVKSQI

SEQ ID NO: 128 - protein, 1095 aa, Riemerella anatipestifer
MEKPLPPNVYTLKHKFFWGAFLNIARHNAFITICHINEQLGLTTPPNDDKIADVVCGTWNNILNNDHDLLKKSQLTELILKHFPFLAAMCYHPPKKEGKKKGSQKEQQKEKENEAQSQAEALNPSELIKVLKTLVKQLRTLRNYYSHHSHKKPDAEKDIFKHLYKAFDASLRMVKEDYKAHFTVNLTQDFAHLNRKGKNKQDNPDFDRYRFEKDGFFTESGLLFFTNLFLDKRDAYWMLKKVSGFKASHKQSEKMTTEVFCRSRILLPKLRLESRYDHNQMLLDMLSELSRYPKLLYEKLSEEDKKRFQVEADGFLDEIEEEQNPFKDTLIRHQDRFPYFALRYLDLNESFKSIRFQVDLGTYHYCIYDKKIGDEQEKRHLTRTLLSFGRLQDFTEINRPQEWKALTKDLDYKETSKQPFISKTTPHYHITDNKIGFRLGTSKELYPSLEVKDGANRIAQYPYNSDFVAHAFISVHELLPLMFYQHLTGKSEDLLKETVRHIQRIYKDFEEERINTIEDLEKANQGRLPLGAFPKQMLGLLQNKQPDLSEKAKIKIEKLIAETKLLSHRLNTKLKSSPKLGKRREKLIKTGVLADWLVKDFMRFQPVAYDAQNQPIESSKANSTEFQLIQRALALYGGEKNRLEGYFKQTNLIGNTNPHPFLNKFNWKACRNLVDFYQQYLEQREKFLEAIKNQPWEPYQYCLLLKIPKENRKNLVKGWEQGGISLPRGLFTEAIRETLSKDLTLSKPIRKEIKKHGRVGFISRAITLYFREKYQDDHQSFYDLPYKLEAKASPLPKKEHYEYWQQNKPQSPTELQRLELHTSDRWKDYLLYKRWQHLEKKLRLYRNQDVMLWLMTLELTKNHFKELNLNYHQLKLENLAVNVQEADAKLNPLNQTLPMVLPVKVYPATAFGEVQYQETPIRTVYIREEQTKALKMGNFKALVKDRRLNGLFSFIKEENDTQKHPISQLRLRRELEIYQSLRVDAFKETLNLEEKLLKKHTSLSSVENKFRILLEEWKKEYAASSMVTDEHIAFIASVRNAFCHNQYPFYEEALHAPIPLFTVAQQTTEEKDGLGIAEALLRVLREYCEIVKSQI

SEQ ID NO: 129 - protein, 1150 aa, Prevotella saccharolytica
MMEKENVQGSHIYYEPTDKCFWAAFYNLARHNAYLTIAHINSFVNSKKGINNDDKVLDIIDDWSKFDNDLLMGARLNKLILKHFPFLKAPLYQLAKRKTRKQQGKEQQDYEKKGDEDPEVIQEAIANAFKMANVRKTLHAFLKQLEDLRNHFSHYNYNSPAKKMEVKFDDGFCNKLYYVFDAALQMVKDDNRMNPEINMQTDFEHLVRLGRNRKIPNTFKYNFTNSDGTINNNGLLFFVSLFLEKRDAIWMQKKIKGFKGGTENYMRMTNEVFCRNRMVIPKLRLETDYDNHQLMFDMLNELVRCPLSLYKRLKQEDQDKFRVPIEFLDEDNEADNPYQENANSDENPTEETDPLKNTLVRHQHRFPYFVLRYFDLNEVFKQLRFQINLGCYHFSIYDKTIGERTEKRHLTRTLFGFDRLQNFSVKLQPEHWKNMVKHLDTEESSDKPYLSDAMPHYQIENEKIGIHFLKTDTEKKETVWPSLEVEEVSSNRNKYKSEKNLTADAFLSTHELLPMMFYYQLLSSEEKTRAAAGDKVQGVLQSYRKKIFDIYDDFANGTINSMQKLDERLAKDNLLRGNMPQQMLAILEHQEPDMEQKAKEKLDRLITETKKRIGKLEDQFKQKVRIGKRRADLPKVGSIADWLVNDMMRFQPAKRNADNTGVPDSKANSTEYRLLQEALAFYSAYKDRLEPYFRQVNLIGGTNPHPFLHRVDWKKCNHLLSFYHDYLEAKEQYLSHLSPADWQKHQHFLLLKVRKDIQNEKKDWKKSLVAGWKNGFNLPRGLFTESIKTWFSTDADKVQITDTKLFENRVGLIAKLIPLYYDKVYNDKPQPFYQYPFNINDRYKPEDTRKRFTAASSKLWNEKKMLYKNAQPDSSDKIEYPQYLDFLSWKKLERELRMLRNQDMMVWLMCKDLFAQCTVEGVEFADLKLSQLEVDVNVQDNLNVLNNVSSMILPLSVYPSDAQGNVLRNSKPLHTVYVQENNTKLLKQGNFKSLLKDRRLNGLFSFIAAEGEDLQQHPLTKNRLEYELSIYQTMRISVFEQTLQLEKAILTRNKTLCGNNFNNLLNSWSEHRTDKKTLQPDIDFLIAVRNAFSHNQYPMSTNTVMQGIEKFNIQTPKLEEKDGLGIASQLAKKTKDAASRLQNIINGGTN

SEQ ID NO: 130 - protein, 1151 aa, Prevotella saccharolytica
MEDKPFWAAFFNLARHNVYLTVNHINKLLDLEKLYDEGKHKEIFEREDIFNISDDVMNDANSNGKKRKLDIKKIWDDLDTDLTRKYQLRELILKHFPFIQPAIIGAQTKERTTIDKDKRSTSTSNDSLKQTGEGDINDLLSLSNVKSMFFRLLQILEQLRNYYSHVKHSKSATMPNFDEDLLNWMRYIFIDSVNKVKEDYSSNSVIDPNTSFSHLIYKDEQGKIKPCRYPFTSKDGSINAFGLLFFVSLFLEKQDSIWMQKKIPGFKKASENYMKMTNEVFCRNHILLPKIRLETVYDKDWMLLDMLNEVVRCPLSLYKRLTPAAQNKFKVPEKSSDNANRQEDDNPFSRILVRHQNRFPYFVLRFFDLNEVFTTLRFQINLGCYHFAICKKQIGDKKEVHHLIRTLYGFSRLQNFTQNTRPEEWNTLVKTTEPSSGNDGKTVQGVPLPYISYTIPHYQIENEKIGIKIFDGDTAVDTDIWPSVSTEKQLNKPDKYTLTPGFKADVFLSVHELLPMMFYYQLLLCEGMLKTDAGNAVEKVLIDTRNAIFNLYDAFVQEKINTITDLENYLQDKPILIGHLPKQMIDLLKGHQRDMLKAVEQKKAMLIKDTERRLKLLDKQLKQETDVAAKNTGTLLKNGQIADWLVNDMMRFQPVKRDKEGNPINCSKANSTEYQMLQRAFAFYATDSCRLSRYFTQLHLIHSDNSHLFLSRFEYDKQPNLIAFYAAYLKAKLEFLNELQPQNWASDNYFLLLRAPKNDRQKLAEGWKNGFNLPRGLFTEKIKTWFNEHKTIVDISDCDIFKNRVGQVARLIPVFFDKKFKDHSQPFYRYDFNVGNVSKPTEANYLSKGKREELFKSYQNKFKNNIPAEKTKEYREYKNFSLWKKFERELRLIKNQDILIWLMCKNLFDEKIKPKKDILEPRIAVSYIKLDSLQTNTSTAGSLNALAKVVPMTLAIHIDSPKPKGKAGNNEKENKEFTVYIKEEGTKLLKWGNFKTLLADRRIKGLFSYIEHDDIDLKQHPLTKRRVDLELDLYQTCRIDIFQQTLGLEAQLLDKYSDLNTDNFYQMLIGWRKKEGIPRNIKEDTDFLKDVRNAFSHNQYPDSKKIAFRRIRKFNPKELILEEEEGLGIATQMYKEVEKVVNRIKRIELFD

SEQ ID NO: 131 - protein, 1127 aa, Prevotella buccae
MQKQDKLFVDRKKNAIFAFPKYITIMENKEKPEPIYYELTDKHFWAAFLNLARHNVYTTINHINRRLEIAELKDDGYMMGIKGSWNEQAKKLDKKVRLRDLIMKHFPFLEAAAYEMTNSKSPNNKEQREKEQSEALSLNNLKNVLFIFLEKLQVLRNYYSHYKYSEESPKPIFETSLLKNMYKVFDANVRLVKRDYMHHENIDMQRDFTHLNRKKQVGRTKNIIDSPNFHYHFADKEGNMTIAGLLFFVSLFLDKKDAIWMQKKLKGFKDGRNLREQMTNEVFCRSRISLPKLKLENVQTKDWMQLDMLNELVRCPKSLYERLREKDRESFKVPFDIFSDDYNAEEEPFKNTLVRHQDRFPYFVLRYFDLNEIFEQLRFQIDLGTYHFSIYNKRIGDEDEVRHLTHHLYGFARIQDFAPQNQPEEWRKLVKDLDHFETSQEPYISKTAPHYHLENEKIGIKFCSAHNNLFPSLQTDKTCNGRSKFNLGTQFTAEAFLSVHELLPMMFYYLLLTKDYSRKESADKVEGIIRKEISNIYAIYDAFANNEINSIADLTRRLQNTNILQGHLPKQMISILKGRQKDMGKEAERKIGEMIDDTQRRLDLLCKQTNQKIRIGKRNAGLLKSGKIADWLVNDMMRFQPVQKDQNNIPINNSKANSTEYRMLQRALALFGSENFRLKAYFNQMNLVGNDNPHPFLAETQWEHQTNILSFYRNYLEARKKYLKGLKPQNWKQYQHFLILKVQKTNRNTLVTGWKNSFNLPRGIFTQPIREWFEKHNNSKRIYDQILSFDRVGFVAKAIPLYFAEEYKDNVQPFYDYPFNIGNRLKPKKRQFLDKKERVELWQKNKELFKNYPSEKKKTDLAYLDFLSWKKFERELRLIKNQDIVTWLMFKELFNMATVEGLKIGEIHLRDIDTNTANEESNNILNRIMPMKLPVKTYETDNKGNILKERPLATFYIEETETKVLKQGNFKALVKDRRLNGLFSFAETTDLNLEEHPISKLSVDLELIKYQTTRISIFEMTLGLEKKLIDKYSTLPTDSFRNMLERWLQCKANRPELKNYVNSLIAVRNAFSHNQYPMYDATLFAEVKKFTLFPSVDTKKIELNIAPQLLEIVGKAIKEIEKSENKN

SEQ ID NO: 132 - protein, 1127 aa, Prevotella buccae; identical to SEQ ID NO: 131

SEQ ID NO: 133 - protein, 1127 aa, Prevotella buccae
MQKQDKLFVDRKKNAIFAFPKYITIMENQEKPEPIYYELTDKHFWAAFLNLARHNVYTTINHINRRLEIAELKDDGYMMDIKGSWNEQAKKLDKKVRLRDLIMKHFPFLEAAAYEITNSKSPNNKEQREKEQSEALSLNNLKNVLFIFLEKLQVLRNYYSHYKYSEESPKPIFETSLLKNMYKVFDANVRLVKRDYMHHENIDMQRDFTHLNRKKQVGRTKNIIDSPNFHYHFADKEGNMTIAGLLFFVSLFLDKKDAIWMQKKLKGFKDGRNLREQMTNEVFCRSRISLPKLKLENVQTKDWMQLDMLNELVRCPKSLYERLREKDRESFKVPFDIFSDDYDAEEEPFKNTLVRHQDRFPYFVLRYFDLNEIFEQLRFQIDLGTYHFSIYNKRIGDEDEVRHLTHHLYGFARIQDFAQQNQPEVWRKLVKDLDYFEASQEPYIPKTAPHYHLENEKIGIKFCSTHNNLFPSLKTEKTCNGRSKFNLGTQFTAEAFLSVHELLPMMFYYLLLTKDYSRKESADKVEGIIRKEISNIYAIYDAFANGEINSIADLTCRLQKTNILQGHLPKQMISILEGRQKDMEKEAERKIGEMIDDTQRRLDLLCKQTNQKIRIGKRNAGLLKSGKIADWLVNDMMRFQPVQKDQNNIPINNSKANSTEYRMLQRALALFGSENFRLKAYFNQMNLVGNDNPHPFLAETQWEHQTNILSFYRNYLEARKKYLKGLKPQNWKQYQHFLILKVQKTNRNTLVTGWKNSFNLPRGIFTQPIREWFEKHNNSKRIYDQILSFDRVGFVAKAIPLYFAEEYKDNVQPFYDYPFNIGNKLKPQKGQFLDKKERVELWQKNKELFKNYPSEKKKTDLAYLDFLSWKKFERELRLIKNQDIVTWLMFKELFNMATVEGLKIGEIHLRDIDTNTANEESNNILNRIMPMKLPVKTYETDNKGNILKERPLATFYIEETETKVLKQGNFKVLAKDRRLNGLLSFAETTDIDLEKNPITKLSVDHELIKYQTTRISIFEMTLGLEKKLINKYPTLPTDSFRNMLERWLQCKANRPELKNYVNSLIAVRNAFSHNQYPMYDATLFAEVKKFTLFPSVDTKKIELNIAPQLLEIVGKAIKEIEKSENKN

SEQ ID NO: 134 - protein, 1127 aa, Prevotella sp.
MQKQDKLFVDRKKNAIFAFPKYITIMENQEKPEPIYYELTDKHFWAAFLNLARHNVYTTINHINRRLEIAELKDDGYMMGIKGSWNEQAKKLDKKVRLRDLIMKHFPFLEAAAYEITNSKSPNNKEQREKEQSEALSLNNLKNVLFIFLEKLQVLRNYYSHYKYSEESPKPIFETSLLKNMYKVFDANVRLVKRDYMHHENIDMQRDFTHLNRKKQVGRTKNIIDSPNFHYHFADKEGNMTIAGLLFFVSLFLDKKDAIWMQKKLKGFKDGRNLREQMTNEVFCRSRISLPKLKLENVQTKDWMQLDMLNELVRCPKSLYERLREKDRESFKVPFDIFSDDYDAEEEPFKNTLVRHQDRFPYFVLRYFDLNEIFEQLRFQIDLGTYHFSIYNKRIGDEDEVRHLTHHLYGFARIQDFAPQNQPEEWRKLVKDLDHFETSQEPYISKTAPHYHLENEKIGIKFCSTHNNLFPSLKREKTCNGRSKFNLGTQFTAEAFLSVHELLPMMFYYLLLTKDYSRKESADKVEGIIRKEISNIYAIYDAFANNEINSIADLTCRLQKTNILQGHLPKQMISILEGRQKDMEKEAERKIGEMIDDTQRRLDLLCKQTNQKIRIGKRNAGLLKSGKIADWLVSDMMRFQPVQKDTNNAPINNSKANSTEYRMLQHALALFGSESSRLKAYFRQMNLVGNANPHPFLAETQWEHQTNILSFYRNYLEARKKYLKGLKPQNWKQYQHFLILKVQKTNRNTLVTGWKNSFNLPRGIFTQPIREWFEKHNNSKRIYDQILSFDRVGFVAKAIPLYFAEEYKDNVQPFYDYPFNIGNKLKPQKGQFLDKKERVELWQKNKELFKNYPSEKNKTDLAYLDFLSWKKFERELRLIKNQDIVTWLMFKELFKTTTVEGLKIGEIHLRDIDTNTANEESNNILNRIMPMKLPVKTYETDNKGNILKERPLATFYIEETETKVLKQGNFKVLAKDRRLNGLLSFAETTDIDLEKNPITKLSVDYELIKYQTTRISIFEMTLGLEKKLIDKYSTLPTDSFRNMLERWLQCKANRPELKNYVNSLIAVRNAFSHNQYPMYDATLFAEVKKFTLFPSVDTKKIELNIAPQLLEIVGKAIKEIEKSENKN

SEQ ID NO: 135 - protein, 1125 aa, Prevotella pallens
MKEEEKGKTPVVSTYNKDDKHFWAAFLNLARHNVYITVNHINKILGEGEINRDGYENTLEKSWNEIKDINKKDRLSKLIIKHFPFLEVTTYQRNSADTTKQKEEKQAEAQSLESLKKSFFVFIYKLRDLRNHYSHYKHSKSLERPKFEEDLQEKMYNIFDASIQLVKEDYKHNTDIKTEEDFKHLDRKGQFKYSFADNEGNITESGLLFFVSLFLEKKDAIWVQKKLEGFKCSNESYQKMTNEVFCRSRMLLPKLRLQSTQTQDWILLDMLNELIRCPKSLYERLREEDRKKFRVPIEIADEDYDAEQEPFKNALVRHQDRFPYFALRYFDYNEIFTNLRFQIDLGTYHFSIYKKQIGDYKESHHLTHKLYGFERIQEFTKQNRPDEWRKFVKTFNSFETSKEPYIPETTPHYHLENQKIGIRFRNDNDKIWPSLKTNSEKNEKSKYKLDKSFQAEAFLSVHELLPMMFYYLLLKTENTDNDNEIETKKKENKNDKQEKHKIEEIIENKITEIYALYDAFANGKINSIDKLEEYCKGKDIEIGHLPKQMIAILKSEHKDMATEAKRKQEEMLADVQKSLESLDNQINEEIENVERKNSSLKSGEIASWLVNDMMRFQPVQKDNEGNPLNNSKANSTEYQMLQRSLALYNKEEKPTRYFRQVNLIESSNPHPFLNNTEWEKCNNILSFYRSYLEAKKNFLESLKPEDWEKNQYFLMLKEPKTNCETLVQGWKNGFNLPRGIFTEPIRKWFMEHRKNITVAELKRVGLVAKVIPLFFSEEYKDSVQPFYNYLFNVGNINKPDEKNFLNCEERRELLRKKKDEFKKMTDKEKEENPSYLEFQSWNKFERELRLVRNQDIVTWLLCMELFNKKKIKELNVEKIYLKNINTNTTKKEKNTEEKNGEEKIIKEKNNILNRIMPMRLPIKVYGRENFSKNKKKKIRRNTFFTVYIEEKGTKLLKQGNFKALERDRRLGGLFSFVKTHSKAESKSNTISKSRVEYELGEYQKARIEIIKDMLALEETLIDKYNSLDTDNFHNMLTGWLKLKDEPDKASFQNDVDLLIAVRNAFSHNQYPMRNRIAFANINPFSLSSANTSEEKGLGIANQLKDKTHKTIEKIIEIEKPIETKE

SEQ ID NO: 136 - protein, 1125 aa, Prevotella pallens; identical to SEQ ID NO: 135

SEQ ID NO: 137 - protein, 1126 aa, Prevotella intermedia
MEDDKKTTDSIRYELKDKHFWAAFLNLARHNVYITVNHINKILEEGEINRDGYETTLKNTWNEIKDINKKDRLSKLIIKHFPFLEAATYRLNPTDTTKQKEEKQAEAQSLESLRKSFFVFIYKLRDLRNHYSHYKHSKSLERPKFEEGLLEKMYNIFNASIRLVKEDYQYNKDINPDEDFKHLDRTEEEFNYYFTKDNEGNITESGLLFFVSLFLEKKDAIWMQQKLRGFKDNRENKKKMTNEVFCRSRMLLPKLRLQSTQTQDWILLDMLNELIRCPKSLYERLREEDREKFRVPIEIADEDYDAEQEPFKNTLVRHQDRFPYFALRYFDYNEIFTNLRFQIDLGTYHFSIYKKQIGDYKESHHLTHKLYGFERIQEFTKQNRPDEWRKFVKTFNSFETSKEPYIPETTPHYHLENQKIGIRFRNDNDKIWPSLKTNSEKNEKSKYKLDKSFQAEAFLSVHELLPMMFYYLLLKTENTDNDNEIETKKKENKNDKQEKHKIEEIIENKITEIYALYDTFANGEIKSIDELEEYCKGKDIEIGHLPKQMIAILKDEHKVMATEAERKQEEMLVDVQKSLESLDNQINEEIENVERKNSSLKSGKIASWLVNDMMRFQPVQKDNEGKPLNNSKANSTEYQLLQRTLAFFGSEHERLAPYFKQTKLIESSNPHPFLKDTEWEKCNNILSFYRSYLEAKKNFLESLKPEDWEKNQYFLKLKEPKTKPKTLVQGWKNGFNLPRGIFTEPIRKWFMKHRENITVAELKRVGLVAKVIPLFFSEEYKDSVQPFYNYHFNVGNINKPDEKNFLNCEERRELLRKKKDEFKKMTDKEKEENPSYLEFKSWNKFERELRLVRNQDIVTWLLCMELFNKKKIKELNVEKIYLKNINTNTTKKEKNTEEKNGEEKNIKEKNNILNRIMPMRLPIKVYGRENFSKNKKKKIRRNTFFTVYIEEKGTKLLKQGNFKALERDRRLGGLFSFVKTPSKAESKSNTISKLRVEYELGEYQKARIEIIKDMLALEKTLIDKYNSLDTDNFNKMLTDWLELKGEPDKASFQNDVDLLIAVRNAFSHNQYPMRNRIAFANINPFSLSSANTSEEKGLGIANQLKDKTHKTIEKIIEIEKPIETKE

SEQ ID NO: 138 - protein, 1120 aa, Prevotella intermedia
MEDDKKTTDSIRYELKDKHFWAAFLNLARHNVYITVNHINKILEEDEINRDGYENTLENSWNEIKDINKKDRLSKLIIKHFPFLEATTYRQNPTDTTKQKEEKQAEAQSLESLKKSFFVFIYKLRDLRNHYSHYKHSKSLERPKFEEDLQNKMYNIFDVSIQFVKEDYKHNTDINPKKDFKHLDRKRKGKFHYSFADNEGNITESGLLFFVSLFLEKKDAIWVQKKLEGFKCSNKSYQKMTNEVFCRSRMLLPKLRLESTQTQDWILLDMLNELIRCPKSLYERLQGVNRKKFYVSFDPADEDYDAEQEPFKNTLVRHQDRFPYFALRYFDYNEVFANLRFQIDLGTYHFSIYKKLIGGQKEDRHLTHKLYGFERIQEFDKQNRPDEWKAIVKDSDTFKKKEEKEEEKPYISETTPHYHLENKKIGIAFKNHNIWPSTQTELTNNKRKKYNLGTSIKAEAFLSVHELLPMMFYYLLLKTENTKNDNKVGGKKETKKQGKHKIEAIIESKIKDIYALYDAFANGEINSEDELKEYLKGKDIKIVHLPKQMIAILKNEHKDMAEKAEAKQEKMKLATENRLKTLDKQLKGKIQNGKRYNSAPKSGEIASWLVNDMMRFQPVQKDENGESLNNSKANSTEYQLLQRTLAFFGSEHERLAPYFKQTKLIESSNPHPFLNDTEWEKCSNILSFYRSYLKARKNFLESLKPEDWEKNQYFLMLKEPKTNRETLVQGWKNGFNLPRGFFTEPIRKWFMEHWKSIKVDDLKRVGLVAKVTPLFFSEKYKDSVQPFYNYPFNVGDVNKPKEEDFLHREERIELWDKKKDKFKGYKAKKKFKEMTDKEKEEHRSYLEFQSWNKFERELRLVRNQDIVTWLLCTELIDKLKIDELNIKELKKLRLKDINTDTAKKEKNNILNRVMPMELPVTVYKVNKGGYIIKNKPLHTIYIKEAETKLLKQGNFKALVKDRRLNGLFSFVKTPSEAESESNPISKLRVEYELGKYQNARLDIIEDMLALEKKLIDKYNSLDTDNFHNMLTGWLELKGEAKKARFQNDVKLLTAVRNAFSHNQYPMYDENLFGNIERFSLSSSNIIESKGLDIAAKLKEEVSKAAKKIQNEEDNKKEKET

SEQ ID NO: 139 - protein, 1134 aa, Prevotella intermedia
MKMEDDKKTKESTNMLDNKHFWAAFLNLARHNVYITVNHINKVLELKNKKDQDIIIDNDQDILAIKTHWEKVNGDLNKTERLRELMTKHFPFLETAIYTKNKEDKEEVKQEKQAKAQSFDSLKHCLFLFLEKLQEARNYYSHYKYSESTKEPMLEKELLKKMYNIFDDNIQLVIKDYQHNKDINPDEDFKHLDRTEEEFNYYFTTNKKGNITASGLLFFVSLFLEKKDAIWMQQKLRGFKDNRESKKKMTHEVFCRSRMLLPKLRLESTQTQDWILLDMLNELIRCPKSLYERLQGEYRKKFNVPFDSADEDYDAEQEPFKNTLVRHQDRFPYFALRYFDYNEIFTNLRFQIDLGTYHFSIYKKLIGGQKEDRHLTHKLYGFERIQEFAKQNRTDEWKAIVKDFDTYETSEEPYISETAPHYHLENQKIGIRFRNDNDEIWPSLKTNGENNEKRKYKLDKQYQAEAFLSVHELLPMMFYYLLLKKEEPNNDKKNASIVEGFIKREIRDIYKLYDAFANGEINNIDDLEKYCEDKGIPKRHLPKQMVAILYDEHKDMAEEAKRKQKEMVKDTKKLLATLEKQTQGEIEDGGRNIRLLKSGEIARWLVNDMMRFQPVQKDNEGNPLNNSKANSTEYQMLQRSLALYNKEEKPTRYFRQVNLINSSNPHPFLKWTKWEECNNILSFYRSYLTKKIEFLNKLKPEDWEKNQYFLKLKEPKTNRETLVQGWKNGFNLPRGIFTEPIREWFKRHQNDSEEYEKVETLDRVGLVTKVIPLFFKKEDSKDKEEYLKKDAQKEINNCVQPFYGFPYNVGNIHKPDEKDFLPSEERKKLWGDKKYKFKGYKAKVKSKKLTDKEKEEYRSYLEFQSWNKFERELRLVRNQDIVTWLLCTELIDKLKVEGLNVEELKKLRLKDIDTDTAKQEKNNILNRVMPMQLPVTVYEIDDSHNIVKDRPLHTVYIEETKTKLLKQGNFKALVKDRRLNGLFSFVDTSSETELKSNPISKSLVEYELGEYQNARIETIKDMLLLEETLIEKYKTLPTDNFSDMLNGWLEGKDEADKARFQNDVKLLVAVRNAFSHNQYPMRNRIAFANINPFSLSSADTSEEKKLDIANQLKDKTHKIIKRIIEIEKPIETKE

SEQ ID NO: 140 - protein, 1132 aa, Prevotella intermedia
MEDDKKTKESTNMLDNKHFWAAFLNLARHNVYITVNHINKVLELKNKKDQDIIIDNDQDILAIKTHWEKVNGDLNKTERLRELMTKHFPFLETAIYTKNKEDKEEVKQEKQAKAQSFDSLKHCLFLFLEKLQEARNYYSHYKYSESTKEPMLEKELLKKMYNIFDDNIQLVIKDYQHNKDINPDEDFKHLDRTEEEFNYYFTTNKKGNITASGLLFFVSLFLEKKDAIWMQQKLRGFKDNRESKKKMTHEVFCRSRMLLPKLRLESTQTQDWILLDMLNELIRCPKSLYERLQGEYRKKFNVPFDSADEDYDAEQEPFKNTLVRHQDRFPYFALRYFDYNEIFTNLRFQIDLGTYHFSIYKKLIGGQKEDRHLTHKLYGFERIQEFAKQNRTDEWKAIVKDFDTYETSEEPYISETAPHYHLENQKIGIRFRNDNDEIWPSLKTNGENNEKRKYKLDKQYQAEAFLSVHELLPMMFYYLLLKKEEPNNDKKNASIVEGFIKREIRDIYKLYDAFANGEINNIDDLEKYCEDKGIPKRHLPKQMVAILYDEHKDMAEEAKRKQKEMVKDTKKLLATLEKQTQGEIEDGGRNIRLLKSGEIARWLVNDMMRFQPVQKDNEGNPLNNSKANSTEYQMLQRSLALYNKEEKPTRYFRQVNLINSSNPHPFLKWTKWEECNNILSFYRSYLTKKIEFLNKLKPEDWEKNQYFLKLKEPKTNRETLVQGWKNGFNLPRGIFTEPIREWFKRHQNDSEEYEKVETLDRVGLVTKVIPLFFKKEDSKDKEEYLKKDAQKEINNCVQPFYGFPYNVGNIHKPDEKDFLPSEERKKLWGDKKYKFKGYKAKVKSKKLTDKEKEEYRSYLEFQSWNKFERELRLVRNQDIVTWLLCTELIDKLKVEGLNVEELKKLRLKDIDTDTAKQEKNNILNRVMPMQLPVTVYEIDDSHNIVKDRPLHTVYIEETKTKLLKQGNFKALVKDRRLNGLFSFVDTSSETELKSNPISKSLVEYELGEYQNARIETIKDMLLLEETLIEKYKTLPTDNFSDMLNGWLEGKDEADKARFQNDVKLLVAVRNAFSHNQYPMRNRIAFANINPFSLSSADTSEEKKLDIANQLKDKTHKIIKRIIEIEKPIETKE

SEQ ID NO: 141 - protein, 1133 aa, Prevotella intermedia
MEDDKKTTDSISYELKDKHFWAAFLNLARHNVYITVNHINKVLELKNKKDQDIIIDNDQDILAIKTHWEKVNGDLNKTERLRELMTKHFPFLETAIYSKNKEDKEEVKQEKQAKAQSFDSLKHCLFLFLEKLQETRNYYSHYKYSESTKEPMLEKELLKKMYNIFDDNIQLVIKDYQHNKDINPDEDFKHLDRTEEDFNYYFTRNKKGNITESGLLFFVSLFLEKKDAIWMQQKLRGFKDNRESKKKMTHEVFCRSRMLLPKLRLESTQTQDWILLDMLNELIRCPKSLYERLQGEDREKFKVPFDPADEDYDAEQEPFKNTLVRHQDRFPYFALRYFDYNEIFTNLRFQIDLGTFHFSIYKKLIGGQKEDRHLTHKLYGFERIQEFAKQNRPDEWKAIVKDLDTYETSNERYISETTPHYHLENQKIGIRFRNDNDEIWPSLKTNGENNEKSKYKLDKQYQAEAFLSVHELLPMMFYYLLLKKEEPNNDKKNASIVEGFIKREIRDMYKLYDAFANGEINNIDDLEKYCEDKGIPKRHLPKQMVAILYDEHKDMVKEAKRKQRKMVKDTEKLLAALEKQTQEKTEDGGRNIRLLKSGEIARWLVNDMMRFQPVQKDNEGNPLNNSKANSTEYQMLQRSLALYNKEEKPTRYFRQVNLINSSNPHPFLKWTKWEECNNILSFYRSYLTKKIEFLNKLKPEDWEKNQYFLKLKEPKTNRETLVQGWKNGFNLPRGIFTEPIREWFKRHQNDSKEYEKVEALDRVGLVTKVIPLFFKKEDSKDKEEDLKKDAQKEINNCVQPFYSFPYNVGNIHKPDEKDFLHREERIELWDKKKDKFKGYKAKVKSKKLTDKEKEEYRSYLEFQSWNKFERELRLVRNQDIVTWLLCTELIDKLKVEGLNVEELKKLRLKDIDTDTAKQEKNNILNRVMPMQLPVTVYEIDDSHNIVKDRPLHTVYIEETKTKLLKQGNFKALVKDRRLNGLFSFVDTSSEAELKSNPISKSLVEYELGEYQNARIETIKDMLLLEETLIEKYKNLPTDNFSDMLNGWLEGKDEADKARFQNDVKLLVAVRNAFSHNQYPMRNRIAFANINPFSLSSADTSEEKKLDIANQLKDKTHKIIKRIIEIEKPIETKE

SEQ ID NO: 142 - protein, 1125 aa, Prevotella intermedia
MKMEDDKKTTESTNMLDNKHFWAAFLNLARHNVYITVNHINKVLELKNKKDQDIIIDNDQDILAIKTHWEKVNGDLNKTERLRELMTKHFPFLETAIYTKNKEDKEEVKQEKQAEAQSLESLKDCLFLFLEKLQEARNYYSHYKYSESTKEPMLEEGLLEKMYNIFDDNIQLVIKDYQHNKDINPDEDFKHLDRKGQFKYSFADNEGNITESGLLFFVSLFLEKKDAIWMQQKLTGFKDNRESKKKMTHEVFCRRRMLLPKLRLESTQTQDWILLDMLNELIRCPKSLYERLQGEYRKKFNVPFDSADEDYDAEQEPFKNTLVRHQDRFPYFALRYFDYNEIFTNLRFQIDLGTYHFSIYKKLIGGQKEDRHLTHKLYGFERIQEFAKQNRPDEWKALVKDLDTYETSNERYISETTPHYHLENQKIGIRFRNGNKEIWPSLKTNGENNEKSKYKLDKPYQAEAFLSVHELLPMMFYYLLLKKEEPNNDKKNASIVEGFIKREIRDMYKLYDAFANGEINNIGDLEKYCEDKGIPKRHLPKQMVAILYDEPKDMVKEAKRKQKEMVKDTKKLLATLEKQTQEEIEDGGRNIRLLKSGEIARWLVNDMMRFQPVQKDNEGNPLNNSKANSTEYQMLQRSLALYNKEEKPTRYFRQVNLINSSNPHPFLKWTKWEECNNILSFYRNYLTKKIEFLNKLKPEDWEKNQYFLKLKEPKTNRETLVQGWKNGFNLPRGIFTEPIREWFKRHQNDSKEYEKVEALKRVGLVTKVIPLFFKEEYFKEDAQKEINNCVQPFYSFPYNVGNIHKPDEKDFLPSEERKKLWGDKKDKFKGYKAKVKSKKLTDKEKEEYRSYLEFQSWNKFERELRLVRNQDIVTWLLCTELIDKMKVEGLNVEELQKLRLKDIDTDTAKQEKNNILNRIMPMQLPVTVYEIDDSHNIVKDRPLHTVYIEETKTKLLKQGNFKALVKDRRLNGLFSFVDTSSKAELKDKPISKSVVEYELGEYQNARIETIKDMLLLEKTLIKKYEKLPTDNFSDMLNGWLEGKDESDKARFQNDVKLLVAVRNAFSHNQYPMRNRIAFANINPFSLSSADISEEKKLDIANQLKDKTHKIIKKIIEIEKPIETKE

SEQ ID NO: 143 - protein, 1124 aa, Prevotella aurantiaca
MEDDKKTTGSISYELKDKHFWAAFLNLARHNVYITINHINKLLEIREIDNDEKVLDIKTLWQKGNKDLNQKARLRELMTKHFPFLETAIYTKNKEDKKEVKQEKQAEAQSLESLKDCLFLFLDKLQEARNYYSHYKYSEFSKEPEFEEGLLEKMYNIFGNNIQLVINDYQHNKDINPDEDFKHLDRKGQFKYSFADNEGNITESGLLFFVSLFLEKKDAIWMQQKLNGFKDNLENKKKMTHEVFCRSRILMPKLRLESTQTQDWILLDMLNELIRCPKSLYERLQGDDREKFKVPFDPADEDYNAEQEPFKNTLIRHQDRFPYFVLRYFDYNEIFKNLRFQIDLGTYHFSIYKKLIGGQKEDRHLTHKLYGFERIQEFAKQNRPDEWKAIVKDLDTYETSNKRYISETTPHYHLENQKIGIRFRNGNKEIWPSLKTNDENNEKSKYKLDKQYQAEAFLSVHELLPMMFYYLLLKKEKPNNDEINASIVEGFIKREIRNIFKLYDAFANGEINNIDDLEKYCADKGIPKRHLPKQMVAILYDEHKDMVKEAKRKQKEMVKDTKKLLATLEKQTQKEKEDDGRNVKLLKSGEIARWLVNDMMRFQPVQKDNEGKPLNNSKANSTEYQMLQRSLALYNNEEKPTRYFRQVNLIESNNPHPFLKWTKWEECNNILTFYYSYLTKKIEFLNKLKPEDWKKNQYFLKLKEPKTNRETLVQGWKNGFNLPRGIFTEPIREWFKRHQNNSKEYEKVEALDRVGLVTKVIPLFFKEEYFKDKEENFKEDTQKEINDCVQPFYNFPYNVGNIHKPKEKDFLHREERIELWDKKKDKFKGYKEKIKSKKLTEKDKEEFRSYLEFQSWNKFERELRLVRNQDIVTWLLCKELIDKLKIDELNIEELKKLRLNNIDTDTAKKEKNNILNRVMPMELPVTVYEIDDSHKIVKDKPLHTIYIKEAETKLLKQGNFKALVKDRRLNGLFSFVKTNSEAESKRNPISKLRVEYELGEYQEARIEIIQDMLALEEKLINKYKDLPTNKFSEMLNSWLEGKDEADKARFQNDVDFLIAVRNAFSHNQYPMHNKIEFANIKPFSLYTANNSEEKGLGIANQLKDKTKETTDKIKKIEKPIETKE

SEQ ID NO: 144 - protein, 1139 aa, Prevotella pleuritidis
MENDKRLEESACYTLNDKHFWAAFLNLARHNVYITVNHINKTLELKNKKNQEIIIDNDQDILAIKTHWAKVNGDLNKTDRLRELMIKHFPFLEAAIYSNNKEDKEEVKEEKQAKAQSFKSLKDCLFLFLEKLQEARNYYSHYKYSESSKEPEFEEGLLEKMYNTFDASIRLVKEDYQYNKDIDPEKDFKHLERKEDFNYLFTDKDNKGKITKNGLLFFVSLFLEKKDAIWMQQKFRGFKDNRGNKEKMTHEVFCRSRMLLPKIRLESTQTQDWILLDMLNELIRCPKSLYERLQGAYREKFKVPFDSIDEDYDAEQEPFRNTLVRHQDRFPYFALRYFDYNEIFKNLRFQIDLGTYHFSIYKKLIGGKKEDRHLTHKLYGFERIQEFTKQNRPDKWQAIIKDLDTYETSNERYISETTPHYHLENQKIGIRFRNDNNDIWPSLKTNGEKNEKSKYNLDKPYQAEAFLSVHELLPMMFYYLLLKMENTDNDKEDNEVGTKKKGNKNNKQEKHKIEEIIENKIKDIYALYDAFTNGEINSIDELAEQREGKDIEIGHLPKQLIVILKNKSKDMAEKANRKQKEMIKDTKKRLATLDKQVKGEIEDGGRNIRLLKSGEIARWLVNDMMRFQPVQKDNEGKPLNNSKANSTEYQMLQRSLALYNKEEKPTRYFRQVNLIKSSNPHPFLEDTKWEECYNILSFYRNYLKAKIKFLNKLKPEDWKKNQYFLMLKEPKTNRKTLVQGWKNGFNLPRGIFTEPIKEWFKRHQNDSEEYKKVEALDRVGLVAKVIPLFFKEEYFKEDAQKEINNCVQPFYSFPYNVGNIHKPEEKNFLHCEERRKLWDKKKDKFKGYKAKEKSKKMTDKEKEEHRSYLEFQSWNKFERELRLVRNQDILTWLLCTKLIDKLKIDELNIEELQKLRLKDIDTDTAKKEKNNILNRVMPMRLPVTVYEIDKSFNIVKDKPLHTVYIEETGTKLLKQGNFKALVKDRRLNGLFSFVKTSSEAESKSKPISKLRVEYELGAYQKARIDIIKDMLALEKTLIDNDENLPTNKFSDMLKSWLKGKGEANKARLQNDVGLLVAVRNAFSHNQYPMYNSEVFKGMKLLSLSSDIPEKEGLGIAKQLKDKIKETIERIIEIEKEIRN

SEQ ID NO: 145 - protein, 1116 aa, Prevotella pleuritidis
MENDKRLEESTCYTLNDKHFWAAFLNLARHNVYITINHINKLLEIRQIDNDEKVLDIKALWQKVDKDINQKARLRELMIKHFPFLEAAIYSNNKEDKEEVKEEKQAKAQSFKSLKDCLFLFLEKLQEARNYYSHYKSSESSKEPEFEEGLLEKMYNTFGVSIRLVKEDYQYNKDIDPEKDFKHLERKEDFNYLFTDKDNKGKITKNGLLFFVSLFLEKKDAIWMQQKLRGFKDNRGNKEKMTHEVFCRSRMLLPKIRLESTQTQDWILLDMLNELIRCPKSLYERLQGAYREKFKVPFDSIDEDYDAEQEPFRNTLVRHQDRFPYFALRYFDYNEIFKNLRFQIDLGTYHFSIYKKLIGDNKEDRHLTHKLYGFERIQEFAKQKRPNEWQALVKDLDIYETSNEQYISETTPHYHLENQKIGIRFKNKKDKIWPSLETNGKENEKSKYNLDKSFQAEAFLSIHELLPMMFYDLLLKKEEPNNDEKNASIVEGFIKKEIKRMYAIYDAFANEEINSKEGLEEYCKNKGFQERHLPKQMIAILTNKSKNMAEKAKRKQKEMIKDTKKRLATLDKQVKGEIEDGGRNIRLLKSGEIARWLVNDMMRFQSVQKDKEGKPLNNSKANSTEYQMLQRSLALYNKEQKPTPYFIQVNLIKSSNPHPFLEETKWEECNNILSFYRSYLEAKKNFLESLKPEDWKKNQYFLMLKEPKTNRKTLVQGWKNGFNLPRGIFTEPIKEWFKRHQNDSEEYKKVEALDRVGLVAKVIPLFFKEEYFKEDAQKEINNCVQPFYSFPYNVGNIHKPEEKNFLHCEERRKLWDKKKDKFKGYKAKEKSKKMTDKEKEEHRSYLEFQSWNKFERELRLVRNQDIVTWLLCTELIDKLKIDELNIEELQKLRLKDIDTDTAKKEKNNILNRIMPMQLPVTVYEIDKSFNIVKDKPLHTIYIEETGTKLLKQGNFKALVKDRRLNGLFSFVKTSSEAESKSKPISKLRVEYELGAYQKARIDIIKDMLALEKTLIDNDENLPTNKFSDMLKSWLKGKGEANKARLQNDVDLLVAIRNAFSHNQYPMYNSEVFKGMKLLSLSSDIPEKEGLGIAKQLKDKIKETIERIIEIEKEIRN

SEQ ID NO: 146 - protein, 1133 aa, Prevotella falsenii
MKNDNNSTKSTDYTLGDKHFWAAFLNLARHNVYITVNHINKVLELKNKKDQEIIIDNDQDILAIKTLWGKVDTDINKKDRLRELIMKHFPFLEAATYQQSSTNNTKQKEEEQAKAQSFESLKDCLFLFLEKLREARNYYSHYKHSKSLEEPKLEEKLLENMYNIFDTNVQLVIKDYEHNKDINPEEDFKHLGRAEGEFNYYFTRNKKGNITESGLLFFVSLFLEKKDAIWAQTKIKGFKDNRENKQKMTHEVFCRSRMLLPKLRLESTQTQDWILLDMLNELIRCPKSLYKRLQGEKREKFRVPFDPADEDYDAEQEPFKNTLVRHQDRFPYFALRYFDYNEIFTNLRFQIDLGTYHFSIYKKQIGDKKEDRHLTHKLYGFERIQEFAKENRPDEWKALVKDLDTFEESNEPYISETTPHYHLENQKIGIRNKNKKKKKTIWPSLETKTTVNERSKYNLGKSFKAEAFLSVHELLPMMFYYLLLNKEEPNNGKINASKVEGIIEKKIRDIYKLYGAFANEEINNEEELKEYCEGKDIAIRHLPKQMIAILKNEYKDMAKKAEDKQKKMIKDTKKRLAALDKQVKGEVEDGGRNIKPLKSGRIASWLVNDMMRFQPVQRDRDGYPLNNSKANSTEYQLLQRTLALFGSERERLAPYFRQMNLIGKDNPHPFLKDTKWKEHNNILSFYRSYLEAKKNFLGSLKPEDWKKNQYFLKLKEPKTNRETLVQGWKNGFNLPRGIFTEPIREWFIRHQNESEEYKKVKDFDRIGLVAKVIPLFFKEDYQKEIEDYVQPFYGYPFNVGNIHNSQEGTFLNKKEREELWKGNKTKFKDYKTKEKNKEKTNKDKFKKKTDEEKEEFRSYLDFQSWKKFERELRLVRNQDIVTWLLCMELIDKLKIDELNIEELQKLRLKDIDTDTAKKEKNNILNRIMPMELPVTVYETDDSNNIIKDKPLHTIYIKEAETKLLKQGNFKALVKDRRLNGLFSFVETSSEAELKSKPISKSLVEYELGEYQRARVEIIKDMLRLEETLIGNDEKLPTNKFRQMLDKWLEHKKETDDTDLKNDVKLLTEVRNAFSHNQYPMRDRIAFANIKPFSLSSANTSNEEGLGIAKKLKDKTKETIDRIIEIEEQTATKR

SEQ ID NO: 147 - protein, 1175 aa, Porphyromonas gulae
MTEQSERPYNGTYYTLEDKHFWAAFLNLARHNAYITLTHIDRQLAYSKADITNDQDVLSFKALWKNLDNDLERKSRLRSLILKHFSFLEGAAYGKKLFESKSSGNKSSKNKELTKKEKEELQANALSLDNLKSILFDFLQKLKDFRNYYSHYRHSGSSELPLFDGNMLQRLYNVFDVSVQRVKRDHEHNDKVDPHRHFNHLVRKGKKDRYGHNDNPSFKHHFVDSEGMVTEAGLLFFVSLFLEKRDAIWMQKKIRGFKGGTETYQQMTNEVFCRSRISLPKLKLESLRMDDWMLLDMLNELVRCPKPLYDRLREDDRACFRVPVDILPDEDDTDGGGEDPFKNTLVRHQDRFPYFALRYFDLKKVFTSLRFHIDLGTYHFAIYKKMIGEQPEDRHLTRNLYGFGRIQDFAEEHRPEEWKRLVRDLDYFETGDKPYISQTSPHYHIEKGKIGLRFMPEGQHLWPSPEVGTTRTGRSKYAQDKRLTAEAFLSVHELMPMMFYYFLLREKYSEEVSAEKVQGRIKRVIEDVYAIYDAFARDEINTLKELDACLADKGIRRGHLPKQMIAILSQEHKNMEEKVRKKLQEMIADTDHRLDMLDRQTDRKIRIGRKNAGLPKSGVIADWLVRDMMRFQPVAKDASGKPLNNSKANSTEYRMLQRALALFGGEKERLTPYFRQMNLTGGNNPHPFLHDTRWESHTNILSFYRSYLRARKAFLERIGRSDRMENRPFLLLKEPKTDRQTLVAGWKSEFHLPRGIFTEAVRDCLIEMGYDEVGSYREVGFMAKAVPLYFERACEDRVQPFYDSPFNVGNSLKPKKGRFLSKEERAEEWERGKERFRDLEAWSHSAARRIEDAFAGIEYASPGNKKKIEQLLRDLSLWEAFESKLKVRADKINLAKLKKEILEAQEHPYHDFKSWQKFERELRLVKNQDIITWMMCRDLMEENKVEGLDTGTLYLKDIRTNVQEQGSLNVLNHVKPMRLPVVVYRADSRGHVHKEEAPLATVYIEERDTKLLKQGNFKSFVKDRRLNGLFSFVDTGGLAMEQYPISKLRVEYELAKYQTARVCAFEQTLELEESLLTRYPHLPDKNFRKMLESWSDPLLAKWPELHGKVRLLIAVRNAFSHNQYPMYDEAVFSSIRKYDPSSPDAIEERMGLNIAHRLSEEVKQAKETVERIIQA

SEQ ID NO: 148 - protein, 1175 aa, Porphyromonas sp.
MTEQSERPYNGTYYTLEDKHFWAAFLNLARHNAYITLTHIDRQLAYSKADITNDQDVLSFKALWKNFDNDLERKSRLRSLILKHFSFLEGAAYGKKLFESKSSGNKSSKNKELTKKEKEELQANALSLDNLKSILFDFLQKLKDFRNYYSHYRHSESSELPLFDGNMLQRLYNVFDVSVQRVKRDHEHNDKVDPHRHFNHLVRKGKKDRYGHNDNPSFKHHFVDSEGMVTEAGLLFFVSLFLEKRDAIWMQKKIRGFKGGTETYQQMTNEVFCRSRISLPKLKLESLRTDDWMLLDMLNELVRCPKPLYDRLREDDRACFRVPVDILPDEDDTDGGGEDPFKNTLVRHQDRFPYFALRYFDLKKVFTSLRFHIDLGTYHFAIYKKMIGEQPEDRHLTRNLYGFGRIQDFAEEHRPEEWKRLVRDLDYFETGDKPYISQTTPHYHIEKGKIGLRFVPEGQHLWPSPEVGTTRTGRSKYAQDKRLTAEAFLSVHELMPMMFYYFLLREKYSEEVSAEKVQGRIKRVIEDVYAIYDAFARDEINTLKELDACLADKGIRRGHLPKQMIGILSQERKDMEEKVRKKLQEMIADTDHRLDMLDRQTDRKIRIGRKNAGLPKSGVIADWLVRDMMRFQPVAKDTSGKPLNNSKANSTEYRMLQRALALFGGEKERLTPYFRQMNLTGGNNPHPFLHETRWESHTNILSFYRSYLRARKAFLERIGRSDRVENCPFLLLKEPKTDRQTLVAGWKGEFHLPRGIFTEAVRDCLIEMGYDEVGSYREVGFMAKAVPLYFERACEDRVQPFYDSPFNVGNSLKPKKGRFLSKEDRAEEWERGKERFRDLEAWSHSAARRIKDAFAGIEYASPGNKKKIEQLLRDLSLWEAFESKLKVRADKINLAKLKKEILEAQEHPYHDFKSWQKFERELRLVKNQDIITWMMCRDLMEENKVEGLDTGTLYLKDIRPNVQEQGSLNVLNRVKPMRLPVVVYRADSRGHVHKEEAPLATVYIEERDTKLLKQGNFKSFVKDRRLNGLFSFVDTGGLAMEQYPISKLRVEYELAKYQTARVCVFELTLRLEESLLSRYPHLPDESFREMLESWSDPLLAKWPELHGKVRLLIAVRNAFSHNQYPMYDEAVFSSIRKYDPSSPDAIEERMGLNIAHRLSEEVKQAKETVERIIQA

SEQ ID NO: 149 - protein, 1174 aa, Porphyromonas gulae
MTEQSERPYNGTYYTLEDKHFWAAFLNLARHNAYITLTHIDRQLAYSKADITNDQDVLSFKALWKNLDNDLERKSRLRSLILKHFSFLEGAAYGKKLFESKSSGNKSSKNKELTKKEKEELQANALSLDNLKSILFDFLQKLKDFRNYYSHYRHSGSSELPLFDGNMLQRLYNVFDVSVQRVKRDHEHNDKVDPHYHFNHLVRKGKKDRYGHNDNPSFKHHFVDSEGMVTEAGLLFFVSLFLEKRDAIWMQKKIRGFKGGTGPYEQMTNEVFCRSRISLPKLKLESLRTDDWMLLDMLNELVRCPKPLYDRLREKDRACFRVPVDILPDEDDTDGGGEDPFKNTLVRHQDRFPYFALRYFDLKKVFTSLRFHIDLGTYHFAIYKKMIGEQPEDRHLTRNLYGFGRIQDFAEEHRPEEWKRLVRDLDYLETGDKPYISQTTPHYHIEKGKIGLRFVPEGQHLWPSPEVGTTRTGRSKCAQDKRLTAEAFLSVHELMPMMFYYFLLREKYSEEVSAEKVQGRIKRVIEDVYAIYDAFARDEINTLKELDTCLADKGIRRGHLPKQMITILSQERKDMKEKIRKKLQEMIADTDHRLDMLDRQTDRKIRIGRKNAGLPKSGVIADWLVRDMMRFQPVAKDASGKPLNNSKANSTEYRMLQRALALFGGEKERLTPYFRQMNLTGGNNPHPFLHETRWESHTNILSFYRSYLRARKAFLERIGRSDRVENCPFLLLKEPKTDRQTLVAGWKDEFHLPRGIFTEAVRDCLIEMGYDEVGSYREVGFMAKAVPLYFERACEDRVQPFYDSPFNVGNSLKPKKGRFLSKEDRAEEWERGMERFRDLEAWSHSAARRIKDAFAGIEYASPGNKKKIEQLLRDLSLWEAFESKLKVRADKINLAKLKKEILEAQEHPYHDFKSWQKFERELRLVKNQDIITWMMCRDLMEENKVEGLDTGTLYLKDIRPNVQEQGSLNVLNRVKPMRLPVVVYRADSRGHVHKEAPLATVYIEERNTKLLKQGNFKSFVKDRRLNGLFSFVDTGGLAMEQYPISKLRVEYELAKYQTARVCVFELTLRLEESLLSRYPHLPDESFREMLESWSDPLLAKWPELHGKVRLLIAVRNAFSHNQYPMYDEAVFSSIRKYDPSSPDAIEERMGLNIAHRLSEEVKQAKETVERIIQA

SEQ ID NO: 150 - protein, 1175 aa, Porphyromonas gulae
MTEQSERPYNGTYYTLEDKHFWAAFLNLARHNAYITLTHIDRQLAYSKADITNDQDVLSFKALWKNFDNDLERKSRLRSLILKHFSFLEGAAYGKKLFESKSSGNKSSKNKELTKKEKEELQANALSLDNLKSILFDFLQKLKDFRNYYSHYRHSESSELPLFDGNMLQRLYNVFDVSVQRVKRDHEHNDKVDPHRHFNHLVRKGKKDRYGHNDNPSFKHHFVDGEGMVTEAGLLFFVSLFLEKRDAIWMQKKIRGFKGGTETYQQMTNEVFCRSRISLPKLKLESLRTDDWMLLDMLNELVRCPKPLYDRLREDDRACFRVPVDILPDEDDTDGGGEDPFKNTLVRHQDRFPYFALRYFDLKKVFTSLRFHIDLGTYHFAIYKKMIGEQPEDRHLTRNLYGFGRIQDFAEEHRPEEWKRLVRDLDYFETGDKPYISQTSPHYHIEKGKIGLRFMPEGQHLWPSPEVGTTRTGRSKYAQDKRLTAEAFLSVHELMPMMFYYFLLREKYSEEVSAEKVQGRIKRVIEDVYAIYDAFARDEINTLKELDACLADKGIRRGHLPKQMIAILSQEHKDMEEKIRKKLQEMIADTDHRLDMLDRQTDRKIRIGRKNAGLPKSGVIADWLVRDMMRFQPVAKDTSGKPLNNSKANSTEYRMLQRALALFGGEKKRLTPYFRQMNLTGGNNPHPFLHETRWESHTNILSFYRSYLRARKAFLERIGRSDRMENRPFLLLKEPKTDRQTLVAGWKSEFHLPRGIFTEAVRDCLIEMGYDEVGSYREVGFMAKAVPLYFERACEDRVQPFYDSPFNVGNSLKPKKGRFLSKEERAEEWERGKERFRDLEAWSHSAARRIEDAFAGIEYASPGNKKKIEQLLRDLSLWEAFESKLKVRADKINLAKLKKEILEAQEHPYHDFKSWQKFERELRLVKNQDIITWMMCRDLMEENKVEGLDTGTLYLKDIRPNVQEQGSLNVLNRVKPMRLPVVVYRADSRGHVHKEEAPLATVYIEERDTKLLKQGNFKSFVKDRRLNGLFSFVDTGGLAMEQYPISKLRVEYELAKYQTARVCVFELTLRLEESLLTRYPHLPDESFRKMLESWSDPLLAKWPELHGKVRLLIAVRNAFSHNQYPMYDEAVFSSIRKYDPSSPDAIEERMGLNIAHRLSEEVKQAKETVERIIQV

SEQ ID NO: 151 - protein, 1175 aa, Porphyromonas gulae
MTEQSERPYNGTYYTLEDKHFWAAFLNLARHNAYITLTHIDRQLAYSKADITNDQDVLSFKALWKNFDNDLERKSRLRSLILKHFSFLEGAAYGKKLFESKSSGNKSSKNKELTKKEKEELQANALSLDNLKSILFDFLQKLKDFRNYYSHYRHSESSELPLFDGNMLQRLYNVFDVSVQRVKRDHEHNDKVDPHRHFNHLVRKGKKDRYGHNDNPSFKHHFVDSEGMVTEAGLLFFVSLFLEKRDAIWMQKKIRGFKGGTETYQQMTNEVFCRSRISLPKLKLESLRTDDWMLLDMLNELVRCPKPLYDRLREKDRARFRVPVDILPDEDDTDGGGEDPFKNTLVRHQDRFPYFALRYFDLKKVFTSLRFHIDLGTYHFAIYKKMIGEQPEDRHLTRNLYGFGRIQDFAEEHRPEEWKRLVRDLDYFETGDKPYISQTTPHYHIEKGKIGLRFMPEGQHLWPSPEVGTTRTGRSKYAQDKRLTAEAFLSVHELMPMMFYYFLLREKYSEEVSAEKVQGRIKRVIEDVYAIYDAFARDEINTLKELDACLADKGIRRGHLPKQMIAILSQEHKDMEEKIRKKLQEMIADTDHRLDMLDRQTDRKIRIGRKNAGLPKSGVIADWLVRDMMRFQPVAKDTSGKPLNNSKANSTEYRMLQRALALFGGEKKRLTPYFRQMNLTGGNNPHPFLHETRWESHTNILSFYRSYLRARKAFLERIGRSDRMENRPFLLLKEPKTDRQTLVAGWKSEFHLPRGIFTEAVRDCLIEMGYDEVGSYREVGFMAKAVPLYFERACEDRVQPFYDSPFNVGNSLKPKKGRFLSKEERAEEWERGKERFRDLEAWSHSAARRIEDAFAGIEYASPGNKKKIEQLLRDLSLWEAFESKLKVRADKINLAKLKKEILEAQEHPYHDFKSWQKFERELRLVKNQDIITWMMCRDLMEENKVEGLDTGTLYLKDIRPNVQEQGSLNVLNRVKPMRLPVVVYRADSRGHVHKEEAPLATVYIEERDTKLLKQGNFKSFVKDRRLNGLFSFVDTGGLAMEQYPISKLRVEYELAKYQTARVCVFELTLRLEESLLTRYPHLPDESFRKMLESWSDPLLAKWPELHGKVRLLIAVRNAFSHNQYPMYDEAVFSSIRKYDPSSPDAIEERMGLNIAHRLSEEVKQAKETVERIIQV

SEQ ID NO: 152 - protein, 1175 aa, Porphyromonas gulae
MTEQSERPYNGTYYTLEDKHFWAAFLNLARHNAYITLTHIDRQLAYSKADITNDQDVLSFKALWKNFDNDLERKSRLRSLILKHFSFLEGAAYGKKLFESKSSGNKSSKNKELTKKEKEELQANALSLDNLKSILFDFLQKLKDFRNYYSHYRHSGSSELPLFDGNMLQRLYNVFDVSVQRVKIDHEHNDEVDPHYHFNHLVRKGKKDRYGHNDNPSFKHHFVDGEGMVTEAGLLFFVSLFLEKRDAIWMQKKIRGFKGGTETYQQMTNEVFCRSRISLPKLKLESLRMDDWMLLDMLNELVRCPKPLYDRLREDDRACFRVPVDILPDEDDTDGGGEDPFKNTLVRHQDRFPYFALRYFDLKKVFTSLRFHIDLGTYHFAIYKKMIGEQPEDRHLTRNLYGFGRIQDFAEEHRPEEWKRLVRDLDYFETGDKPYISQTSPHYHIEKGKIGLRFMPEGQHLWPSPEVGTTRTGRSKYAQDKRLTAEAFLSVHELMPMMFYYFLLREKYSEEVSAERVQGRIKRVIEDVYAVYDAFARDEINTRDELDACLADKGIRRGHLPRQMIAILSQEHKDMEEKIRKKLQEMMADTDHRLDMLDRQTDRKIRIGRKNAGLPKSGVIADWLVRDMMRFQPVAKDASGKPLNNSKANSTEYRMLQRALALFGGEKERLTPYFRQMNLTGGNNPHPFLHETRWESHTNILSFYRSYLRARKAFLERIGRSDRVENRPFLLLKEPKTDRQTLVAGWKGEFHLPRGIFTEAVRDCLIEMGHDEVASYKEVGFMAKAVPLYFERACEDRVQPFYDSPFNVGNSLKPKKGRFLSKEERAEEWERGKERFRDLEAWSYSAARRIEDAFAGIEYASPGNKKKIEQLLRDLSLWEAFESKLKVRADRINLAKLKKEILEAQEHPYHDFKSWQKFERELRLVKNQDIITWMMCRDLMEENKVEGLDTGTLYLKDIRPNVQEQGSLNVLNRVKPMRLPVVVYRADSRGHVHKEEAPLATVYIEERDTKLLKQGNFKSFVKDRRLNGLFSFVDTGGLAMEQYPISKLRVEYELAKYQTARVCVFELTLRLEESLLTRYPHLPDESFREMLESWSDPLLAKWPELHGKVRLLIAVRNAFSHNQYPMYDEAVFSSIRKYDPSSPDAIEERMGLNIAHRLSEEVKQAKETVERIIQA

SEQ ID NO: 153 - protein, 1119 aa, Porphyromonas gulae
MTEQSERPYNGTYYTLEDKHFWAAFLNLARHNAYITLTHIDRQLAYSKADITNDQDVLSFKALWKNLDNDLERKSRLRSLILKHFSFLEGAAYGKKLFESKSSGNKSSKNKELTKKEKEELQANALSLDNLKSILFDFLQKLKDFRNYYSHYRHSGSSELPLFDGNMLQRLYNVFDVSVQRVKRDHEHNDKVDPHRHFNHLVRKGKKDRYGHNDNPSFKHHFVDGEGMVTEAGLLFFVSLFLEKRDAIWMQKKIRGFKGGTETYQQMTNEVFCRSRISLPKLKLESLRTDDWMLLDMLNELVRCPKPLYDRLREKDRARFRVPVDILPDEDDTDGGGEDPFKNTLVRHQDRFPYFALRYFDLKKVFTSLRFHIDLGTYHFAIYKKVIGEQPEDRHLTRNLYGFGRIQDFAEEHRPEEWKRLVRDLDYFETGDKPYISQTTPHYHIEKGKIGLRFVPEGQHLWPSPEVGTTRTGRSKYAQDKRLTAEAFLSVHELMPMMFYYFLLREKYSEEVSAEKVQGRIKRVIEDVYAIYDAFARDEINTRDELDACLADKGIRRGHLPKQMIGILSQEHKNMEEKVRKKLQEMIADTDHRLDMLDRQTDRKIRIGRKNAGLPKSGVIADWLVRDMMRFQPVAKDTSGKPLNNSKANSTEYRMLQRALALFGGEKERLTPYFRQMNLTGGNNPHPFLDETRWESHTNILSFYRSYLRARKAFLERIGRSDRVENRPFLLLKEPKTDRQTLVAGWKSEFHLPRGIFTEAVRDCLIEMGYDEVGSYKEVGFMAKAVPLYFERACKDRVQPFYDSPFNVGNSLKPKKGRFLSKEKRAEEWESGKERFRLAKLKKEILEAQEHPYHDFKSWQKFERELRLVKNQDIITWMMCRDLMEENKVEGLDTGTLYLKDIRPNVQEQGSLNVLNRVKPMRLPVVVYRADSRGHVHKEEAPLATVYIEERDTKLLKQGNFKSFVKDRRLNGLFSFVDTGGLAMEQYPISKLRVEYELAKYQTARVCVFELTLRLEESLLSRYPHLPDESFREMLESWSDPLLAKWPELHGKVRLLIAVRNAFSHNQYPMYDEAVFSSIRKYDPSSPDAIEERMGLNIAHRLSEEVKQAKETVERIIQA

SEQ ID NO: 154 - protein, 1119 aa, Porphyromonas gulae
MTEQSERPYNGTYYTLEDKHFWAAFLNLARHNAYITLTHIDRQLAYSKADITNDQDVLSFKALWKNFDNDLERKSRLRSLILKHFSFLEGAAYGKKLFESKSSGNKSSKNKELTKKEKEELQANALSLDNLKSILFDFLQKLKDFRNYYSHYRHSGSSELPLFDGNMLQRLYNVFDVSVQRVKRDHEHNDKVDPHYHFNHLVRKGKKDRYGHNDNPSFKHHFVDSEGMVTEAGLLFFVSLFLEKRDAIWMQKKIRGFKGGTGPYEQMTNEVFCRSRISLPKLKLESLRTDDWMLLDMLNELVRCPKPLYDRLREKDRACFRVPVDILPDEDDTDGGGEDPFKNTLVRHQDRFPYFALRYFDLKKVFTSLRFHIDLGTYHFAIYKKMIGEQPEDRHLTRNLYGFGRIQDFAEEHRPEEWKRLVRDLDYFETGDKPYISQTTPHYHIEKGKIGLRFMPEGQHLWPSPEVGTTRTGRSKYAQDKRLTAEAFLSVHELMPMMFYYFLLREKYSEEVSAEKVQGRIKRVIKDVYAIYDAFARDEINTLKELDACSADKGIRRGHLPKQMIGILSQEHKNMEEKVRKKLQEMIADTDHRLDMLDRQTDRKIRIGRKNAGLPKSGVIADWLVRDMMRFQPVAKDTSGKPLNNSKANSTEYRMLQRALALFGGEKERLTPYFRQMNLTGGNNPHPFLDETRWESHTNILSFYRSYLRARKAFLERIGRSDRVENRPFLLLKEPKNDRQTLVAGWKSEFHLPRGIFTEAVRDCLIEMGYDEVGSYKEVGFMAKAVPLYFERACKDRVQPFYDSPFNVGNSLKPKKGRFLSKEKRAEEWESGKERFRLAKLKKEILEAKEHPYHDFKSWQKFERELRLVKNQDIITWMMCRDLMEENKVEGLDTGTLYLKDIRTDVHEQGSLNVLNRVKPMRLPVVVYRADSRGHVHKEQAPLATVYIEERDTKLLKQGNFKSFVKDRRLNGLFSFVDTGGLAMEQYPISKLRVEYELAKYQTARVCAFEQTLELEESLLTRYPHLPDENFREMLESWSDPLLGKWPDLHGKVRLLIAVRNAFSHNQYPMYDEAVFSSIRKYDPSSPDAIEERMGLNIAHRLSEEVKQAKETVERIIQA

SEQ ID NO: 155 - protein, 1119 aa, Porphyromonas gulae
MTEQSERPYNGTYYTLEDKHFWAAFLNLARHNAYITLTHIDRQLAYSKADITNDEDILFFKGQWKNLDNDLERKSRLRSLILKHFSFLEGAAYGKKFFESKSSGNKSSKNKELTKKEKEELQANALSLDNLKSILFDFLQKLKDFRNYYSHYRHSGSSELPLFDGNMLQRLYNVFDVSVQRVKRDHEHNDEVDPHYHFNHLVRKGKKDRYGHNDNPSFKHHFVDGEGMVTEAGLLFFVSLFLEKRDAIWMQKKIRGFKGGTEPYEQMTNEVFCRSRISLPKLKLESLRTDDWMLLDMLNELVRCPKPLYDRLREKDRACFRVPVDILPDEDDTDGGGEDPFKNTLVRHQDRFPYFALRYFDLKKVFTSLRFHIDLGTYHFAIYKKMIGEQPEDRHLTRNLYGFGRIQDFAEEHRPEEWKRLVRDLDYFETGDKPYISQTTPHYHIEKGKIGLRFVPEGQHLWPSPEVGTTRTGRSKYAQDKRLTAEAFLSVHELMPMMFYYFLLREKYSEEVSAEKVQGRIKRVIEDVYAIYDAFARDEINTLKELDACLADKGIRRGHLPKQMIGILSQERKDMEEKVRKKLQEMIADTDHRLDMLDRQTDRKIRIGRKNAGLPKSGVIADWLVRDMMRFQPVAKDTSGKPLNNSKANSTEYRMLQRALALFGGEKERLTPYFRQMNLTGGNNPHPFLHETRWESHTNILSFYRSYLRARKAFLERIGRSDRVENCPFLLLKEPKTDRQTLVAGWKGEFHLPRGIFTEAVRDCLIEMGYDEVGSYREVGFMAKAVPLYFERACEDRVQPFYDSPFNVGNSLKPKKGRFLSKEKRAEEWESGKERFRLAKLKKEILEAQEHPYHDFKSWQKFERELRLVKNQDIITWMMCRDLMEENKVEGLDTGTLYLKDIRPNVQEQGSLNVLNRVKPMRLPVVVYRADSRGHVHKEEAPLATVYIEERDTKLLKQGNFKSFVKDRRLNGLFSFVDTGALAMEQYPISKLRVEYELAKYQTARVCAFEQTLELEESLLTRYPHLPDESFREMLESWSDPLLTKWPELHGKVRLLIAVRNAFSHNQYPMYDEAVFSSIWKYDPSSPDAIEERMGLNIAHRLSEEVKQAKETIERIIQA

SEQ ID NO: 156 - protein, 1119 aa, Porphyromonas gingivalis
MTEQNEKPYNGTYYTLEDKHFWAAFFNLARHNAYITLAHIDRQLAYSKADITNDEDILFFKGQWKNLDNDLERKARLRSLILKHFSFLEGAAYGKKLFESQSSGNKSSKNKELTKKEKEELQANALSLDNLKSILFDFLQKLKDFRNYYSHYRHPESSELPLFDGNMLQRLYNVFDVSVQRVKRDHEHNDKVDPHRHFNHLVRKGKKDRYGNNDNPFFKHHFVDREGTVTEAGLLFFVSLFLEKRDAIWMQKKIRGFKGGTETYQQMTNEVFCRSRISLPKLKLESLRTDDWMLLDMLNELVRCPKSLYDRLREEDRARFRVPVDILSDEEDTDGAEEDPFKNTLVRHQDRFPYFALRYFDLKKVFTSLRFQIDLGTYHFAIYKKNIGEQPEDRHLTRNLYGFGRIQDFAEEHRPEEWKRLVRDLDYFETGDKPYITQTTPHYHIEKGKIGLRFVPEGQHLWPSPEVGATRTGRSKYAQDKRFTAEAFLSAHELMPMMFYYFLLREKYSEEASAERVQGRIKRVIEDVYAVYDAFARDEINTRDELDACLADKGIRRGHLPRQMIGILSQEHKDMEEKIRKKLQEMMADTDHRLDMLDRQTDRKIRIGRKNAGLPKSGVIADWLVRDMMRFQPVAKDTSGKPLNNSKANSTEYRMLQRALALFGGEKERLTPYFRQMNLTGGNNPHPFLHETRWESHTNILSFYRSYLKARKAFLQSIGRSDRVENHRFLLLKEPKTDRQTLVAGWKGEFHLPRGIFTEAVRDCLIEMGLDEVGSYKEVGFMAKAVPLYFERACKDWVQPFYNYPFNVGNSLKPKKGRFLSKEKRAEEWESGKERFRLAKLKKEILEAKEHPYLDFKSWQKFERELRLVKNQDIITWMICGDLMEENKVEGLDTGTLYLKDIRTDVQEQGSLNVLNRVKPMRLPVVVYRADSRGHVHKEQAPLATVYIEERDTKLLKQGNFKSFVKDRRLNGLFSFVDTGALAMEQYPISKLRVEYELAKYQTARVCAFEQTLELEESLLTRCPHLPDKNFRKMLESWSDPLLDKWPDLHRKVRLLIAVRNAFSHNQYPMYDEAVFSSIRKYDPSFPDAIEERMGLNIAHRLSEEVKQAKETVERIIQA

SEQ ID NO: 157 - protein, 1119 aa, Porphyromonas gingivalis
MTEQNERPYNGTYYTLEDKHFWAAFFNLARHNAYITLAHIDRQLAYSKADITNDEDILFFKGQWKNLDNDLERKARLRSLILKHFSFLEGAAYGKKLFESQSSGNKSSKKKELTKKEKEELQANALSLDNLKSILFDFLQKLKDFRNYYSHYRHPESSELPLFDGNMLQRLYNVFDVSVQRVKRDHEHNDKVDPHRHFNHLVRKGKKDRYGNNDNPFFKHHFVDREEKVTEAGLLFFVSLFLEKRDAIWMQKKIRGFKGGTETYQQMTNEVFCRSRISLPKLKLESLRTDDWMLLDMLNELVRCPKSLYDRLREEDRARFRVPVDILSDEDDTDGTEEDPFKNTLVRHQDRFPYFALRYFDLKKVFTSLRFHIDLGTYHFAIYKKNIGEQPEDRHLTRNLYGFGRIQDFAEEHRPEEWKRLVRDLDYFETGDKPYITQTTPHYHIEKGKIGLRFVPEGQHLWPSPEVGATRTGRSKYAQDKRLTAEAFLSVHELMPMMFYYFLLREKYSDEASAERVQGRIKRVIEDVYAVYDAFARGEINTRDELDACLADKGIRRGHLPRQMIGILSQEHKDMEEKVRKKLQEMIVDTDHRLDMLDRQTDRKIRIGRKNAGLPKSGVIADWLVRDMMRFQPVAKDTSGKPLNNSKANSTEYRMLQRALALFGGEKERLTPYFRQMNLTGGNNPHPFLHETRWESHTNILSFYRSYLKARKAFLQSIGRSDRVENHRFLLLKEPKTDRQTLVAGWKGEFHLPRGIFTEAVRDCLIEMGLDEVGSYKEVGFMAKAVPLYFERACKDRVQPFYDYPFNVGNSLKPKKGRFLSKEKRAEEWESGKERFRLAKLKKEILEAKEHPYLDFKSWQKFERELRLVKNQDIITWMICRDLMEENKVEGLDTGTLYLKDIRTDVQEQGNLNVLNRVKPMRLPVVVYRADSRGHVHKEQAPLATVYIEERDTKLLKQGNFKSFVKDRRLNGLFSFVDTGALAMEQYPISKLRVEYELAKYQTARVCAFEQTLELEESLLTRYPHLPDKNFRKMLESWSDPLLDKWPDLHGNVRLLIAVRNAFSHNQYPMYDEAVFSSIRKYDPSSPDAIEERMGLNIAHRLSEEVKQAKEMAERIIQA

SEQ ID NO: 158 - protein, 1175 aa, Porphyromonas gingivalis
MTEQNEKPYNGTYYTLKDKHFWAAFFNLARHNAYITLTHIDRQLAYSKADITNDEDILFFKGQWKNLDNDLERKARLRSLILKHFSFLEGAAYGKKLFESQSSGNKSSKKKELTKKEKEELQANALSLDNLKSILFDFLQKLKDFRNYYSHYRHPESSELPMFDGNMLQRLYNVFDVSVQRVKRDHEHNDKVDPHRHFNHLVRKGKKDRCGNNDNPFFKHHFVDREGKVTEAGLLFFVSLFLEKRDAIWMQKKIRGFKGGTETYQQMTNEVFCRSRISLPKLKLESLRTDDWMLLDMLNELVRCPKSLYDRLREEDRACFRVPVDILSDEDDTDGAEEDPFKNTLVRHQDRFPYFALRYFDLKKVFTSLRFHIDLGTYHFAIYKKNIGEQPEDRHLTRNLYGFGRIQDFAEEHRPEEWKRLVRDLDCFETGDKPYITQTTPHYHIEKGKIGLRFVPEGQHLWPSPEVGATRTGRSKYAQDKRFTAEAFLSVHELMPMMFYYFLLREKYSEEVSAERVQGRIKRVIEDVYAVYDAFARDEINTRDELDACLADKGIRRGHLPRQMIAILSQKHKDMEEKVRKKLQEMIADTDHRLDMLDRQTDRKIRIGRKNAGLPKSGVIADWLVRDMMRFQPVAKDTSGKPLNNSKANSTEYRMLQRALALFGGEKERLTPYFRQMNLTGGNNPHPFLHETRWESHTNILSFYRSYLKARKAFLQSIGRSDRVENHRFLLLKEPKTDRQTLVAGWKGEFHLPRGIFTEAVRDCLIEMGLDEVGSYKEVGFMAKAVPLYFERACKDRVQPFYDYPFNVGNSLKPKKGRFLSKEKRAEEWESGKERFRDLEAWSHSAARRIEDAFAGIENASRENKKKIEQLLQDLSLWETFESKLKVKADKINIAKLKKEILEAKEHPYLDFKSWQKFERELRLVKNQDIITWMMCRDLMEENKVEGLDTGTLYLKDIRTDVQEQGSLNVLNHVKPMRLPVVVYRADSRGHVHKEQAPLATVYIEERDTKLLKQGNFKSFVKDRRLNGLFSFVDTGALAMEQYPISKLRVEYELAKYQTARVCAFEQTLELEESLLTRYPHLPDENFRKMLESWSDPLLDKWPDLHRKVRLLIAVRNAFSHNQYPMYDEAVFSSIRKYDPSSPDAIEERMGLNIAHRLSEEVKQAKEMAERIIQA

SEQ ID NO: 159 - protein, 1175 aa, Porphyromonas gingivalis
MTEQNEKPYNGTYYTLEDKHFWAAFFNLARHNAYITLTHIDRQLAYSKADITNDEDILFFKGQWKNLDNDLERKARLRSLILKHFSFLEGAAYGKKLFESQSSGNKSSKKKELTKKEKEELQANALSLDNLKSILFDFLQKLKDFRNYYSHYRHPESSELPLFDGNMLQRLYNVFDVSVQRVKRDHEHNDKVDPHRHFNHLVRKGKKDRCGNNDNPFFKHHFVDREEKVTEAGLLFFVSLFLEKRDAIWMQKKIRGFKGGTETYQQMTNEVFCRSRISLPKLKLESLRTDDWMLLDMLNELVRCPKSLYDRLREEDRARFRVPVDILSDEDDTDGTEEDPFKNTLVRHQDRFPYFALRYFDLKKVFTSLRFHIDLGTYHFAIYKKNIGEQPEDRHLTRNLYGFGRIQDFAEEHRPEEWKRLVRDLDYFETGDKPYITQTTPHYHIEKGKIGLRFVPEGQLLWPSPEVGATRTGRSKYAQDKRFTAEAFLSVHELMPMMFYYFLLREKYSEEASAERVQGRIKRVIEDVYAVYDAFARGEIDTLDRLDACLADKGIRRGHLPRQMIAILSQEHKDMEEKVRKKLQEMIADTDHRLDMLDRQTDRKIRIGRKNAGLPKSGVIADWLVRDMMRFQPVAKDTSGKPLNNSKANSTEYRMLQRALALFGGEKERLTPYFRQMNLTGGNNPHPFLHETRWESHTNILSFYRSYLKARKAFLQSIGRSDRVENHRFLLLKEPKTDRQTLVAGWKGEFHLPRGIFTEAVRDCLIEMGLDEVGSYKEVGFMAKAVPLYFERACKDRVQPFYDYPFNVGNSLKPKKGRFLSKEKRAEEWESGKERFRDLEAWSHSAARRIEDAFAGIENASRENKKKIEQLLQDLSLWETFESKLKVKADKINIAKLKKEILEAKEHPYLDFKSWQKFERELRLVKNQDIITWMMCRDLMEENKVEGLDTGTLYLKDIRTDVHEQGSLNVLNRVKPMRLPVVVYRADSRGHVHKEQAPLATVYIEERDTKLLKQGNFKSFVKDRRLNGLFSFVDTGALAMEQYPISKLRVEYELAKYQTARVCAFEQTLELEESLLTRYPHLPDKNFRKMLESWSDPLLDKWPDLHGNVRLLIAVRNAFSHNQYPMYDETLFSSIRKYDPSSPDAIEERMGLNIAHRLSEEVKQAKEMVERIIQA

SEQ ID NO: 160 - protein, 1175 aa, Porphyromonas gingivalis
MTEQNEKPYNGTYYTLEDKHFWAAFFNLARHNAYITLAHIDRQLAYSKADITNDEDILFFKGQWKNLDNDLERKARLRSLILKHFSFLEGAAYGKKLFESQSSGNKSSKKKELTKKEKEELQANALSLDNLKSILFDFLQKLKDFRNYYSHYRHPESSELPLFDGNMLQRLYNVFDVSVQRVKRDHEHNDKVDPHRHFNHLVRKGKKDKYGNNDNPFFKHHFVDREEKVTEAGLLFFVSLFLEKRDAIWMQKKIRGFKGGTEAYQQMTNEVFCRSRISLPKLKLESLRTDDWMLLDMLNELVRCPKSLYDRLREEDRARFRVPVDILSDEDDTDGTEEDPFKNTLVRHQDRFPYFALRYFDLKKVFTSLRFHIDLGTYHFAIYKKNIGEQPEDRHLTRNLYGFGRIQDFAEEHRPEEWKRLVRDLDYFETGDKPYITQTTPHYHIEKGKIGLRFVPEGQLLWPSPEVGATRTGRSKYAQDKRFTAEAFLSVHELMPMMFYYFLLREKYSEEASAEKVQGRIKRVIEDVYAVYDAFARDEINTRDELDACLADKGIRRGHLPRQMIAILSQEHKDMEEKVRKKLQEMIADTDHRLDMLDRQTDRKIRIGRKNAGLPKSGVIADWLVRDMMRFQPVAKDTSGKPLNNSKANSTEYRMLQRALALFGGEKERLTPYFRQMNLTGGNNPHPFLHETRWESHTNILSFYRSYLKARKAFLQSIGRSDREENHRFLLLKEPKTDRQTLVAGWKSEFHLPRGIFTEAVRDCLIEMGYDEVGSYKEVGFMAKAVPLYFERACKDRVQPFYDYPFNVGNSLKPKKGRFLSKEKRAEEWESGKERFRDLEAWSHSAARRIEDAFVGIEYASWENKKKIEQLLQDLSLWETFESKLKVKADKINIAKLKKEILEAKEHPYHDFKSWQKFERELRLVKNQDIITWMMCRDLMEENKVEGLDTGTLYLKDIRTDVQEQGSLNVLNHVKPMRLPVVVYRADSRGHVHKEEAPLATVYIEERDTKLLKQGNFKSFVKDRRLNGLFSFVDTGALAMEQYPISKLRVEYELAKYQTARVCAFEQTLELEESLLTRYPHLPDESFREMLESWSDPLLDKWPDLQREVRLLIAVRNAFSHNQYPMYDETIFSSIRKYDPSSLDAIEERMGLNIAHRLSEEVKLAKEMVERIIQA

SEQ ID NO: 161 - protein, 1175 aa, Porphyromonas gingivalis
MTEQNEKPYNGTYYTLEDKHFWAAFFNLARHNAYITLAHIDRQLAYSKADITNDEDILFFKGQWKNLDNDLERKARLRSLILKHFSFLEGAAYGKKLFESQSSGNKSSKKKELTKKEKEELQANALSLDNLKSILFDFLQKLKDFRNYYSHYRHPESSELPLFDGNMLQRLYNVFDVSVQRVKRDHEHNDKVDPHRHFNHLVRKGKKDKYGNNDNPFFKHHFVDREEKVTEAGLLFFVSLFLEKRDAIWMQKKIRGFKGGTEAYQQMTNEVFCRSRISLPKLKLESLRTDDWMLLDMLNELVRCPKLLYDRLREEDRARFRVPVDILSDEDDTDGTEEDPFKNTLVRHQDRFPYFALRYFDLKKVFTSLRFHIDLGTYHFAIYKKNIGEQPEDRHLTRNLYGFGRIQDFAEEHRPEEWKRLVRDLDYFETGDKPYITQTTPHYHIEKGKIGLRFVPEGQLLWPSPEVGATRTGRSKYAQDKRFTAEAFLSVHELMPMMFYYFLLREKYSEEASAEKVQGRIKRVIEDVYAVYDAFARDEINTRDELDACLADKGIRRGHLPRQMIAILSQEHKDMEEKVRKKLQEMIADTDHRLDMLDRQTDRKIRIGRKNAGLPKSGVIADWLVRDMMRFQPVAKDTSGKPLNNSKANSTEYRMLQRALALFGGEKERLTPYFRQMNLTGGNNPHPFLHETRWESHTNILSFYRSYLKARKAFLQSIGRSDREENHRFLLLKEPKTDRQTLVAGWKSEFHLPRGIFTEAVRDCLIEMGYDEVGSYKEVGFMAKAVPLYFERACKDRVQPFYDYPFNVGNSLKPKKGRFLSKEKRAEEWESGKERFRDLEAWSHSAARRIEDAFVGIEYASWENKKKIEQLLQDLSLWETFESKLKVKADKINIAKLKKEILEAKEHPYHDFKSWQKFERELRLVKNQDIITWMMCRDLMEENKVEGLDTGTLYLKDIRTDVQEQGSLNVLNHVKPMRLPVVVYRADSRGHVHKEEAPLATVYIEERDTKLLKQGNFKSFVKDRRLNGLFSFVDTGALAMEQYPISKLRVEYELAKYQTARVCAFEQTLELEESLLTRYPHLPDESFREMLESWSDPLLDKWPDLQREVRLLIAVRNAFSHNQYPMYDETIFSSIRKYDPSSLDAIEERMGLNIAHRLSEEVKLAKEMVERIIQA

SEQ ID NO: 162 - protein, 1119 aa, Porphyromonas gingivalis
MTEQNERPYNGTYYTLEDKHFWAAFFNLARHNAYITLAHIDRQLAYSKADITNDEDILFFKGQWKNLDNDLERKARLRSLILKHFSFLEGAAYGKKLFESQSSGNKSSKKKELTKKEKEELQANALSLDNLKSILFDFLQKLKDFRNYYSHYRHPESSELPLFDGNMLQRLYNVFDVSVQRVKRDHEHNDKVDPHRHFNHLVRKGKKDRYGNNDNPFFKHHFVDREGTVTEAGLLFFVSLFLEKRDAIWMQKKIRGFKGGTEAYQQMTNEVFCRSRISLPKLKLESLRTDDWMLLDMLNELVRCPKSLYDRLREEDRARFRVPIDILSDEDDTDGTEEDPFKNTLVRHQDRFPYFALRYFDLKKVFTSLRFHIDLGTYHFAIYKKNIGEQPEDRHLTRNLYGFGRIQDFAEEHRPEEWKRLVRDLDYFETGDKPYITQTTPHYHIEKGKIGLRFVPEGQHLWPSPEVGATRTGRSKYAQDKRLTAEAFLSVHELMPMMFYYFLLREKYSEEVSAEKVQGRIKRVIEDVYAVYDAFARGEIDTLDRLDACLADKGIRRGHLPRQMIAILSQEHKDMEEKVRKKLQEMIADTDHRLDMLDRQTDRKIRIGRKNAGLPKSGVIADWLVRDMMRFQPVAKDTSGKPLNNSKANSTEYRMLQRALALFGGEKERLTPYFRQMNLTGGNNPHPFLHETRWESHTNILSFYRSYLKARKAFLQSIGRSDREENHRFLLLKEPKTDRQTLVAGWKSEFHLPRGIFTEAVRDCLIEMGYDEVGSYKEVGFMAKAVPLYFERACKDRVQPFYDYPFNVGNSLKPKKGRFLSKEKRAEEWESGKERFRLAKLKKEILEAKEHPYLDFKSWQKFERELRLVKNQDIITWMMCRDLMEENKVEGLDTGTLYLKDIRTDVHEQGSLNVLNRVKPMRLPVVVYRADSRGHVHKEQAPLATVYIEERDTKLLKQGNFKSFVKDRRLNGLFSFVDTGALAMEQYPISKLRVEYELAKYQTARVCAFEQTLELEESLLTRYPHLPDKNFRKMLESWSDPLLDKWPDLHRKVRLLIAVRNAFSHNQYPMYDEAVFSSIRKYDPSSPDAIEERMGLNIAHRLSEEVKQAKEMAERIIQV

SEQ ID NO: 163 - protein, 1119 aa, Porphyromonas gingivalis
MTEQNERPYNGTYYTLEDKHFWAAFFNLARHNAYITLTHIDRQLAYSKADITNDEDILFFKGQWKNLDNDLERKARLRSLILKHFSFLEGAAYGKKLFENKSSGNKSSKKKELTKKEKEELQANALSLDNLKSILFDFLQKLKDFRNYYSHYRHPESSELPLFDGNMLQRLYNVFDVSVQRVKRDHEHNDKVDPHRHFNHLVRKGKKDRCGNNDNPFFKHHFVDREGKVTEAGLLFFVSLFLEKRDAIWMQKKIRGFKGGTEAYQQMTNEVFCRSRISLPKLKLESLRTDDWMLLDMLNELVRCPKSLYDRLREEDRARFRVPVDILSDEDDTDGTEEDPFKNTLVRHQDRFPYFALRYFDLKKVFTSLRFHIDLGTYHFAIYKKNIGEQPEDRHLTRNLYGFGRIQDFAEEHRPEEWKRLVRDLDYFETGDKPYITQTTPHYHIEKGKIGLRFVPEGQHLWPSPEVGATRTGRSKYAQDKRLTAEAFLSVHELMPMMFYYFLLREKYSEEVSAEKVQGRIKRVIEDVYAVYDAFARGEIDTLDRLDACLADKGIRRGHLPRQMIAILSQEHKDMEEKVRKKLQEMIADTDHRLDMLDRQTDRKIRIGRKNAGLPKSGVIADWLVRDMMRFQPVAKDTSGKPLNNSKANSTEYRMLQRALALFGGEKERLTPYFRQMNLTGGNNPHPFLHETRWESHTNILSFYRSYLKARKAFLQSIGRSDREENHRFLLLKEPKTDRQTLVAGWKSEFHLPRGIFTEAVRDCLIEMGYDEVGSYKEVGFMAKAVPLYFERACKDRVQPFYDYPFNVGNSLKPKKGRFLSKEKRAEEWESGKERFRLAKLKKEILEAKEHPYLDFKSWQKFERELRLVKNQDIITWMMCRDLMEENKVEGLDTGTLYLKDIRTEVQEQGSLNVLNRVKPMRLPVVVYRADSRGHVHKEQAPLATVYIEERDTKLLKQGNFKSFVKDRRLNGLFSFVDTGGLAMEQYPISKLRVEYELAKYQTARVCAFEQTLELEESLLTRCPHLPDKNFRKMLESWSDPLLDKWPDLQREVWLLIAVRNAFSHNQYPMYDEAVFSSIRKYDPSSPDAIEERMGLNIAHRLSEEVKQAKEMAERIIQA

SEQ ID NO: 164 - protein, 1115 aa, Fusobacterium necrophorum
MEKFRRQNRNSIIKIIISNYDTKGIKELKVRYRKQAQLDTFIIKTEIVNNDIFIKSIIEKAREKYRYSFLFDGEEKYHFKNKSSVEIVKKDIFSQTPDNMIRNYKITLKISEKNPRVVEAEIEDLMNSTILKDGRRSARREKSMTERKLIEEKVAKNYSLLANCPMEEVDSIKIYKIKRFLTYRSNMLLYFASINSFLCEGIKGKDNETEEIWHLKDNDVRKEKVRENFKNKLIQSTENYNSSLKNQIEEKEKLLRKEFKKGAFYRTIIKKLQQERIKELSEKSLTEDCEKIIKLYSKLRHSLMHYDYQYFENLFENKKNDDLMKDLNLDLFKSLPLIRKMKLNNKVNYLEDGDTLFVLQKTKKAKTLYQIYDALCEQKNGFNKFINDFFVSDGEENTVFKQIINEKFQSEMEFLEKRISESEKKNEKLKKKLDSMKAHFRNINSEDTKEAYFWDIHSSRNYKTKYNERKNLVNEYTELLGSSKEKKLLREEITKINRQLLKLKQEMEEITKKNSLFRLEYKMKIAFGFLFCEFDGNISKFKDEFDASNQEKIIQYHKNGEKYLTSFLKEEEKEKFNLEKMQKIIQKTEEEDWLLPETKNNLFKFYLLTYLLLPYELKGDFLGFVKKHYYDIKNVDFIDENQNNIQVSQTVEKQEDYFYHKIRLFEKNTKKYEIVKYSIVPNEKLKQYFEDLGIDIKYLTVEQKSEVSEEKNKKVSLKNNGMFNKTILLFVFKYYQIAFKLFNDIELYSLFFLREKSGKPLEIFRKELESKMKDGYLNFGQLLYVVYEVLVKNKDLDKILSKKIDYRKDKSFSPEIAYLRNFLSHLNYSKFLDNFMKINTNKSDENKEVLIPSIKIQKMIQFIEKCNLQNQIDFDFNFVNDFYMRKEKMFFIQLKQIFPDINSTEKQKMNEKEEILRNRYHLTDKKNEQIKDEHEAQSQLYEKILSLQKIYSSDKNNFYGRLKEEKLLFLEKQGKKKLSMEEIKDKIAGDISDLLGILKKEITRDIKDKLTEKFRYCEEKLLNLSFYNHQDKKKEESIRVFLIRDKNSDNFKFESILDDGSNKIFISKNGKEITIQCCDKVLETLIIEKNTLKISSNGKIISLIPHYSYSIDVKY

SEQ ID NO: 165 - protein, 1111 aa, Fusobacterium necrophorum
MEKFRRQNRSSIIKIIISNYDTKGIKELKVRYRKQAQLDTFIIKTEIVNNDIFIKSIIEKAREKYRYSFLFDGEEKYHFKNKSSVEIVKKDIFSQTPDNMIRNYKITLKISEKNPRVVEAEIEDLMNSTILKDGRRSARREKSMTERKLIEEKVAENYSLLANCPMEEVDSIKIYKIKRFLTYRSNMLLYFASINSFLCEGIKGKDNETEEIWHLKDNDVRKEKVKENFKNKLIQSTENYNSSLKNQIEEKEKLLRKESKKGAFYRTIIKKLQQERIKELSEKSLTEDCEKIIKLYSELRHPLMHYDYQYFENLFENKENSELTKNLNLDIFKSLPLVRKMKLNNKVNYLEDNDTLFVLQKTKKAKTLYQIYDALCEQKNGFNKFINDFFVSDGEENTVFKQIINEKFQSEIEFLEKRISESEKKNEKLKKKLDSMKAHFRNINSEDTKEAYFWDIHSSRNYKTKYNERKNLVNEYTELLGSSKEKKLLREEITKINRQLLKLKQEMEEITKKNSLFRLEYKMKMAFGFLFCEFDGNISRFKDEFDASNQEKIIQYHKNGEKYLTYFLKEEEKEKFNLKKLQETIQKTGEENWLLPQNKNNLFKFYLLTYLLLPYELKGDFLGFVKKHYYDIKNVDFMDENQSSKIIESKEDDFYHKIRLFEKNTKKYEIVKYSIVPDKKLKQYFKDLGIDTKYLILDQKSEVSGEKNKKVSLKNNGMFNKTILLFVFKYYQIAFKLFNDIELYSLFFLREKSGKPFEVFLKELKDKMIGKQLNFGQLLYVVYEVLVKNKDLSEILSERIDYRKDMCFSAEIADLRNFLSHLNYSKFLDNFMKINTNKSDENKEVLIPSIKIQKMIKFIEECNLQSQIDFDFNFVNDFYMRKEKMFFIQLKQIFPDINSTEKQKMNEKEEILRNRYHLTDKKNEQIKDEHEAQSQLYEKILSLQKIYSSDKNNFYGRLKEEKLLFLEKQEKKKLSMEEIKDKIAGDISDLLGILKKEITRDIKDKLTEKFRYCEEKLLNLSFYNHQDKKKEESIRVFLIRDKNSDNFKFESILDDGSNKIFISKNGKEITIQCCDKVLETLIIEKNTLKISSNGKIISLIPHYSYSIDVKY

SEQ ID NO: 166 - protein, 1110 aa, Fusobacterium necrophorum
MKVRYRKQAQLDTFIIKTEIVNNDIFIKSIIEKAREKYRYSFLFDGEEKYHFKNKSSVEIVKNDIFSQTPDNMIRNYKITLKISEKNPRVVEAEIEDLMNSTILKDGRRSARREKSMTERKLIEEKVAENYSLLANCPIEEVDSIKIYKIKRFLTYRSNMLLYFASINSFLCEGIKGKDNETEEIWHLKDNDVRKEKVKENFKNKLIQSTENYNSSLKNQIEEKEKLSSKEFKKGAFYRTIIKKLQQERIKELSEKSLTEDCEKIIKLYSELRHPLMHYDYQYFENLFENKENSELTKNLNLDIFKSLPLVRKMKLNNKVNYLEDNDTLFVLQKTKKAKTLYQIYDALCEQKNGFNKFINDFFVSDGEENTVFKQIINEKFQSEMEFLEKRISESEKKNEKLKKKLDSMKAHFRNINSEDTKEAYFWDIHSSRNYKTKYNERKNLVNEYTKLLGSSKEKKLLREEITKINRQLLKLKQEMEEITKKNSLFRLEYKMKIAFGFLFCEFDGNISKFKDEFDASNQEKIIQYHKNGEKYLTSFLKEEEKEKFNLEKMQKIIQKTEEEDWLLPETKNNLFKFYLLTYLLLPYELKGDFLGFVKKHYYDIKNVDFMDENQNNIQVSQTVEKQEDYFYHKIRLFEKNTKKYEIVKYSIVPNEKLKQYFEDLGIDIKYLTGSVESGEKWLGENLGIDIKYLTVEQKSEVSEEKNKKVSLKNNGMFNKTILLFVFKYYQIAFKLFNDIELYSLFFLREKSEKPFEVFLEELKDKMIGKQLNFGQLLYVVYEVLVKNKDLDKILSKKIDYRKDKSFSPEIAYLRNFLSHLNYSKFLDNFMKINTNKSDENKEVLIPSIKIQKMIQFIEKCNLQNQIDFDFNFVNDFYMRKEKMFFIQLKQIFPDINSTEKQKKSEKEEILRKRYHLINKKNEQIKDEHEAQSQLYEKILSLQKIFSCDKNNFYRRLKEEKLLFLEKQGKKKISMKEIKDKIASDISDLLGILKKEITRDIKDKLTEKFRYCEEKLLNISFYNHQDKKKEEGIRVFLIRDKNSDNFKFESILDDGSNKIFISKNGKEITIQCCDKVLETLMIEKNTLKISSNGKIISLIPHYSYSIDVKY

SEQ ID NO: 167 - protein, 668 aa, Fusobacterium necrophorum
MTEKKSIIFKNKSSVEIVKKDIFSQTPDNMIRNYKITLKISEKNPRVVEAEIEDLMNSTILKDGRRSARREKSMTERKLIEEKVAENYSLLANCPMEEVDSIKIYKIKRFLTYRSNMLLYFASINSFLCEGIKGKDNETEEIWHLKDNDVRKEKVKENFKNKLIQSTENYNSSLKNQIEEKEKLLRKESKKGAFYRTIIKKLQQERIKELSEKSLTEDCEKIIKLYSELRHPLMHYDYQYFENLFENKENSELTKNLNLDIFKSLPLVRKMKLNNKVNYLEDNDTLFVLQKTKKAKTLYQIYDALCEQKNGFNKFINDFFVSDGEENTVFKQIINEKFQSEMEFLEKRISESEKKNEKLKKKFDSMKAHFHNINSEDTKEAYFWDIHSSSNYKTKYNERKNLVNEYTELLGSSKEKKLLREEITQINRKLLKLKQEMEEITKKNSLFRLEYKMKIAFGFLFCEFDGNISKFKDEFDASNQEKIIQYHKNGEKYLTYFLKEEEKEKFNLEKMQKIIQKTEEEDWLLPETKNNLFKFYLLTYLLLPYELKGDFLGFVKKHYYDIKNVDFMDENQNNIQVSQTVEKQEDYFYHKIRLFEKNTKKYEIVKYSIVPNEKLKQYFEDLGIDIKYLTGSVESGEKWLGENLGIDIKYLTVEQKSEVSEEKIKKFL

SEQ ID NO: 168 - protein, 1121 aa, Fusobacterium perfoetens
MGKPNRSSIIKIIISNYDNKGIKEVKVRYNKQAQLDTFLIKSELKDGKFILYSIVDKAREKYRYSFEIDKTNINKNEILIIKKDIYSNKEDKVIRKYILSFEVSEKNDRTIVTKIKDCLETQKKEKFERENTRRLISETERKLLSEETQKTYSKIACCSPEDIDSVKIYKIKRYLAYRSNMLLFFSLINDIFVKGVVKDNGEEVGEIWRIIDSKEIDEKKTYDLLVENFKKRMSQEFINYKQSIENKIEKNTNKIKEIEQKLKKEKYKKEINRLKKQLIELNRENDLLEKDKIELSDEEIREDIEKILKIYSDLRHKLMHYNYQYFENLFENKKISKEKNEDVNLTELLDLNLFRYLPLVRQLKLENKTNYLEKEDKITVLGVSDSAIKYYSYYNFLCEQKNGFNNFINSFFSNDGEENKSFKEKINLSLEKEIEIMEKETNEKIKEINKNELQLMKEQKELGTAYVLDIHSLNDYKISHNERNKNVKLQNDIMNGNRDKNALDKINKKLVELKIKMDKITKRNSILRLKYKLQVAYGFLMEEYKGNIKKFKDEFDISKEKIKSYKSKGEKYLEVKSEKKYITKILNSIEDIHNITWLKNQEENNLFKFYVLTYILLPFEFRGDFLGFVKKHYYDIKNVEFLDENNDRLTPEQLEKMKNDSFFNKIRLFEKNSKKYDILKESILTSERIGKYFSLLNTGAKYFEYGGEENRGIFNKNIIIPIFKYYQIVLKLYNDVELAMLLTLSESDEKDINKIKELVTLKEKVSPKKIDYEKKYKFSVLLDCFNRIINLGKKDFLASEEVKEVAKTFTNLAYLRNKICHLNYSKFIDDLLTIDTNKSTTDSEGKLLINDRIRKLIKFIRENNQKMNISIDYNYINDYYMKKEKFIFGQRKQAKTIIDSGKKANKRNKAEELLKMYRVKKENINLIYELSKKLNELTKSELFLLDKKLLKDIDFTDVKIKNKSFFELKNDVKEVANIKQALQKHSSELIGIYKKEVIMAIKRSIVSKLIYDEEKVLSIIIYDKTNKKYEDFLLEIRRERDINKFQFLIDEKKEKLGYEKIIETKEKKKVVVKIQNNSELVSEPRIIKNKDKKKAKTPEEISKLGILDLTNHYCFNLKITL

SEQ ID NO: 169 - protein, 897 aa, Fusobacterium ulcerans
MENKGNNKKIDFDENYNILVAQIKEYFTKEIENYNNRIDNIIDKKELLKYSEKKEESEKNKKLEELNKLKSQKLKILTDEEIKADVIKIIKIFSDLRHSLMHYEYKYFENLFENKKNEELAELLNLNLFKNLTLLRQMKIENKTNYLEGREEFNIIGKNIKAKEVLGHYNLLAEQKNGFNNFINSFFVQDGTENLEFKKLIDEHFVNAKKRLERNIKKSKKLEKELEKMEQHYQRLNCAYVWDIHTSTTYKKLYNKRKSLIEEYNKQINEIKDKEVITAINVELLRIKKEMEEITKSNSLFRLKYKMQIAYAFLEIEFGGNIAKFKDEFDCSKMEEVQKYLKKGVKYLKYYKDKEAQKNYEFPFEEIFENKDTHNEEWLENTSENNLFKFYILTYLLLPMEFKGDFLGVVKKHYYDIKNVDFTDESEKELSQVQLDKMIGDSFFHKIRLFEKNTKRYEIIKYSILTSDEIKRYFRLLELDVPYFEYEKGTDEIGIFNKNIILTIFKYYQIIFRLYNDLEIHGLFNISSDLDKILRDLKSYGNKNINFREFLYVIKQNNNSSTEEEYRKIWENLEAKYLRLHLLTPEKEEIKTKTKEELEKLNEISNLRNGICHLNYKEIIEEILKTEISEKNKEATLNEKIRKVINFIKENELDKVELGFNFINDFFMKKEQFMFGQIKQVKEGNSDSITTERERKEKNNKKLKETYELNCDNLSEFYETSNNLRERANSSSLLEDSAFLKKIGLYKVKNNKVNSKVKDEEKRIENIKRKLLKDSSDIMGMYKAEVVKKLKEKLILIFKHDEEKRIYVTVYDTSKAVPENISKEILVKRNNSKEEYFFEDNNKKYVTEYYTLEITETNELKVIPAKKLEGKEFKTEKNKENKLMLNNHYCFNVKIIY

SEQ ID NO: 170 - protein, 1111 aa, Anaerosalibacter sp.
MKSGRREKAKSNKSSIVRVIISNFDDKQVKEIKVLYTKQGGIDVIKFKSTEKDEKGRMKFNFDCAYNRLEEEEFNSFGGKGKQSFFVTTNEDLTELHVTKRHKTTGEIIKDYTIQGKYTPIKQDRTKVTVSITDNKDHFDSNDLGDKIRLSRSLTQYTNRILLDADVMKNYREIVCSDSEKVDETINIDSQEIYKINRFLSYRSNMIIYYQMINNFLLHYDGEEDKGGNDSINLINEIWKYENKKNDEKEKIIERSYKSIEKSINQYILNHNTEVESGDKEKKIDISEERIKEDLKKTFILFSRLRHYMVHYNYKFYENLYSGKNFIIYNKDKSKSRRFSELLDLNIFKELSKIKLVKNRAVSNYLDKKTTIHVLNKNINAIKLLDIYRDICETKNGFNNFINNMMTISGEEDKEYKEMVTKHFNENMNKLSIYLENFKKHSDFKTNNKKKETYNLLKQELDEQKKLRLWFNAPYVYDIHSSKKYKELYVERKKYVDIHSKLIEAGINNDNKKKLNEINVKLCELNTEMKEMTKLNSKYRLQYKLQLAFGFILEEFNLDIDKFVSAFDKDNNLTISKFMEKRETYLSKSLDRRDNRFKKLIKDYKFRDTEDIFCSDRENNLVKLYILMYILLPVEIRGDFLGFVKKNYYDLKHVDFIDKRNNDNKDTFFHDLRLFEKNVKRLEVTSYSLSDGFLGKKSREKFGKELEKFIYKNVSIALPTNIDIKEFNKSLVLPMMKNYQIIFKLLNDIEISALFLIAKKEGNEGSITFKKVIDKVRKEDMNGNINFSQVMKMALNEKVNCQIRNSIAHINMKQLYIEPLNIYINNNQNKKTISEQMEEIIDICITKGLTGKELNKNIINDYYMKKEKLVFNLKLRKRNNLVSIDAQQKNMKEKSILNKYDLNYKDENLNIKEIILKVNDLNNKQKLLKETTEGESNYKNALSKDILLLNGIIRKNINFKIKEMILGIIQQNEYRYVNINIYDKIRKEDHNIDLKINNKYIEISCYENKSNESTDERINFKIKYMDLKVKNELLVPSCYEDIYIKKKIDLEIRYIENCKVVYIDIYYKKYNINLEFDGKTLFVKFNKDVKKNNQKVNLESNYIQNIKFIVS

SEQ ID NO: 171 - protein, 229 aa, Rattus sp. [sequence omitted]

SEQ ID NO: 172 - protein, 236 aa, Homo sapiens
MTSEKGPSTGDPTLRRRIEPWEFDVFYDPRELRKEACLLYEIKWGMSRKIWRSSGKNTTNHVEVNFIKKFTSERDFHPSMSCSITWFLSWSPCWECSQAIREFLSRHPGVTLVIYVARLFWHMDQQNRQGLRDLVNSGVTIQIMRASEYYHCWRNFVNYPPGDEAHWPQYPPLWMMLYALELHCIILSLPPCLKISRRWQNHLTFFRLHLQNCHYQTIPPHILLATGLIHPSVAWR

SEQ ID NO: 173 - protein, 325 aa, Homo sapiens
MELKYHPEMRFFHWFSKWRKLHRDQEYEVTWYISWSPCTKCTRDMATFLAEDPKVTLTIFVARLYYFWDPDYQEALRSLCQKRDGPRATMKIMNYDEFQHCWSKFVYSQRELFEPWNNLPKYYILLHIMLGEILRHSMDPPTFTFNFNNEPWVRGRHETYLCYEVERMHNDTWVLLNQRRGFLCNQAPHKHGFLEGRHAELCFLDVIPFWKLDLDQDYRVTCFTSWSPCFSCAQEMAKFISKNKHVSLCIFTARIYDDQGRCQEGLRTLAEAGAKISIMTYSEFKHCWDTFVDHQGCPFQPWDGLDEHSQDLSGRLRAILQNQEN

SEQ ID NO: 174 - protein, 208 aa, Petromyzon marinus
MTDAEYVRIHEKLDIYTFKKQFFNNKKSVSHRCYVLFELKRRGERRACFWGYAVNKPQSGTERGIHAEIFSIRKVEEYLRDNPGQFTINWYSSWSPCADCAEKILEWYNQELRGNGHTLKIWACKLYYEKNARNQIGLWNLRDNGVGLNVMVSEHYQCCRKIFIQSSHNQLNENRWLEKTLKRAEKRRSELSIMIQVKILHTTKSPAV

SEQ ID NO: 175 - protein, 200 aa, Homo sapiens
MDSLLMNRRKFLYQFKNVRWAKGRRETYLCYVVKRRDSATSFSLDFGYLRNKNGCHVELLFLRYISDWDLDPGRCYRVTWFTSWSPCYDCARHVADFLRGNPYLSLRIFTARLYFCEDRKAEPEGLRRLHRAGVQIAIMTFKDYFYCWNTFVENHERTFKAWEGLHENSVRLSRQLRRILLPLYEVDDLRDAFRTLGLLD

SEQ ID NO: 176 - protein, 181 aa, Homo sapiens
MDSLLMNRRKFLYQFKNVRWAKGRRETYLCYVVKRRDSATSFSLDFGYLRNKNGCHVELLFLRYISDWDLDPGRCYRVTWFTSWSPCYDCARHVADFLRGNPNLSLRIFTARLYFCEDRKAEPEGLRRLHRAGVQIAIMTFKDYFYCWNTFVENHERTFKAWEGLHENSVRLSRQLRRILL

SEQ ID NO: 177 - protein, 7 aa, Simian virus 40
PKKKRKV

SEQ ID NO: 178 - protein, 16 aa, Artificial Sequence
  Synthetic
KRPAATKKAGQAKKKK

SEQ ID NO: 179 - protein, 9 aa, Artificial Sequence
  Synthetic
PAAKRVKLD

SEQ ID NO: 180 - protein, 11 aa, Artificial Sequence
  Synthetic
RQRRNELKRSP

SEQ ID NO: 181 - protein, 38 aa, Homo sapiens
NQSSNFGPMKGGNFGGRSSGPYGGGGQYFAKPRNQGGY

SEQ ID NO: 182 - protein, 42 aa, Unknown
  IBB domain from importin-alpha
RMRIZFKNKGKDTAELRRRRVEVSVELRKAKKDEQILKRRNV

SEQ ID NO: 183 - protein, 8 aa, Unknown
  Myoma T protein
VSRKRPRP

SEQ ID NO: 184 - protein, 8 aa, Unknown
  Myoma T protein
PPKKARED

SEQ ID NO: 185 - protein, 8 aa, Homo sapiens
PQPKKKPL

SEQ ID NO: 186 - protein, 12 aa, Mus sp.
SALIKKKKKMAP

SEQ ID NO: 187 - protein, 5 aa, Influenza virus
DRLRR

SEQ ID NO: 188 - protein, 7 aa, Influenza virus
PKQKKRK

SEQ ID NO: 189 - protein, 10 aa, Hepatitus virus
RKLKKKIKKL

SEQ ID NO: 190 - protein, 10 aa, Mus sp.
REKKKFLKRR

SEQ ID NO: 191 - protein, 20 aa, Homo sapiens
KRKGDEVDGVDEVAKKKSKK

SEQ ID NO: 192 - protein, 17 aa, Homo sapiens
RKCLQAGMNLEARKTKK

SEQ ID NO: 193 - DNA, 20 bp, Artificial Sequence
  Synthetic
gagtccgagcagaagaagaa

SEQ ID NO: 194 - DNA, 20 bp, Artificial Sequence
  Synthetic
gagtcctagcaggagaagaa

SEQ ID NO: 195 - DNA, 20 bp, Artificial Sequence
  Synthetic
gagtctaagcagaagaagaa

SEQ ID NO: 196 - DNA, 18 bp, Artificial Sequence
  Synthetic
gggggsgggggsgggggs

SEQ ID NO: 197 - DNA, 15 bp, Artificial Sequence
  Synthetic
ggggsggggsggggs

SEQ ID NO: 198 - DNA, 30 bp, Artificial Sequence
  Synthetic
ggggsggggsggggsggggsggggsggggs

SEQ ID NO: 199 - DNA, 45 bp, Artificial Sequence
  Synthetic
ggggsggggsggggsggggsggggsggggsggggsggggsggggs

SEQ ID NO: 200 - DNA, 60 bp, Artificial Sequence
  Synthetic
ggggsggggsggggsggggsggggsggggsggggsggggsggggsggggsggggsggggs

SEQ ID NO: 201 - protein, 12 aa, Artificial Sequence
  Synthetic
FWYHKMILVAGC

SEQ ID NO: 202 - protein, 12 aa, Artificial Sequence
  Synthetic
WYHKREDCSTNQ

SEQ ID NO: 203 - protein, 9 aa, Artificial Sequence
  Synthetic
VCAGSPTND

SEQ ID NO: 204 - protein, 4 aa, Artificial Sequence
  Synthetic
FWYH

SEQ ID NO: 205 - protein, 5 aa, Artificial Sequence
  Synthetic
HKRED

SEQ ID NO: 206 - protein, 4 aa, Artificial Sequence
  Synthetic
GGGS

SEQ ID NO: 207 - protein, 12 aa, Artificial Sequence
  Synthetic
GGGSGGGSGGGS

SEQ ID NO: 208 - protein, 7 aa, Artificial Sequence
  Synthetic
AEAAAKA

SEQ ID NO: 209 - protein, 5 aa, Artificial Sequence
  Synthetic
GGGGS

SEQ ID NO: 210 - protein, 10 aa, Artificial Sequence
  Synthetic
GGGGSGGGGS

SEQ ID NO: 211 - protein, 20 aa, Artificial Sequence
  Synthetic
GGGGSGGGGSGGGGSGGGGS

SEQ ID NO: 212 - protein, 25 aa, Artificial Sequence
  Synthetic
GGGGSGGGGSGGGGSGGGGSGGGGS

SEQ ID NO: 213 - protein, 35 aa, Artificial Sequence
  Synthetic
GGGGSGGGGSGGGGSGGGGSGGGGSGGGGSGGGGS

SEQ ID NO: 214 - protein, 40 aa, Artificial Sequence
  Synthetic
GGGGSGGGGSGGGGSGGGGSGGGGSGGGGSGGGGSGGGGS

SEQ ID NO: 215 - protein, 50 aa, Artificial Sequence
  Synthetic
GGGGSGGGGSGGGGSGGGGSGGGGSGGGGSGGGGSGGGGSGGGGSGGGGS

SEQ ID NO: 216 - protein, 55 aa, Artificial Sequence
  Synthetic
GGGGSGGGGSGGGGSGGGGSGGGGSGGGGSGGGGSGGGGSGGGGSGGGGSGGGGS

SEQ ID NO: 217 - protein, 9 aa, Artificial Sequence
  Synthetic
LAGLIDADG

SEQ ID NO: 218 - DNA, 20 bp, Artificial Sequence
  Synthetic
gccaaattggacgaccctcg

SEQ ID NO: 219 - DNA, 20 bp, Artificial Sequence
  Synthetic
cgaggagacccccgtttcgg

SEQ ID NO: 220 - DNA, 20 bp, Artificial Sequence
  Synthetic
cccgccgccgccgtggctcg

SEQ ID NO: 221 - DNA, 20 bp, Artificial Sequence
  Synthetic
tgagctctacgagatccaca

SEQ ID NO: 222 - protein, 9 aa, Streptococcus pyogenes
WRQLLNAKL

SEQ ID NO: 223 - protein, 9 aa, Streptococcus pyogenes
VITLKSKLV

SEQ ID NO: 224 - protein, 9 aa, Streptococcus pyogenes
ILLSDILRV

SEQ ID NO: 225 - protein, 9 aa, Streptococcus pyogenes
LFDDKVMKQ

SEQ ID NO: 226 - protein, 9 aa, Streptococcus pyogenes
LIHDDSLTF

SEQ ID NO: 227 - protein, 9 aa, Streptococcus pyogenes
LVSDFRKDF

SEQ ID NO: 228 - protein, 9 aa, Streptococcus pyogenes
ILADANLDK

SEQ ID NO: 229 - protein, 9 aa, Streptococcus pyogenes
FLAAKNLSD

SEQ ID NO: 230 - protein, 9 aa, Streptococcus pyogenes
FYSNIMNFF

SEQ ID NO: 231 - protein, 9 aa, Streptococcus pyogenes
FKTEITLAN

SEQ ID NO: 232 - protein, 9 aa, Streptococcus pyogenes
FKTEITLAN

SEQ ID NO: 233 - protein, 9 aa, Streptococcus pyogenes
IEKILTFRI

SEQ ID NO: 234 - protein, 9 aa, Streptococcus pyogenes
FFYSNIMNF

SEQ ID NO: 235 - protein, 9 aa, Streptococcus pyogenes
YLASHYEKL

SEQ ID NO: 236 - protein, 9 aa, Streptococcus pyogenes
IYHLRKKLV

SEQ ID NO: 237 - protein, 9 aa, Streptococcus pyogenes
LAHMIKFRG

SEQ ID NO: 238 - protein, 9 aa, Streptococcus pyogenes
ILSARLSKS

SEQ ID NO: 239 - protein, 9 aa, Streptococcus pyogenes
LKALVRQQL

SEQ ID NO: 240 - protein, 9 aa, Streptococcus pyogenes
YKFIKPILE

SEQ ID NO: 241 - protein, 9 aa, Streptococcus pyogenes
IEKILTFRI

SEQ ID NO: 242 - protein, 9 aa, Streptococcus pyogenes
VITLKSKLV

SEQ ID NO: 243 - protein, 9 aa, Streptococcus pyogenes
FATVRKVLS

SEQ ID NO: 244 - protein, 9 aa, Streptococcus pyogenes
IYHLRKKLV

SEQ ID NO: 245 - protein, 9 aa, Streptococcus pyogenes
LAHMIKFRG

SEQ ID NO: 246 - protein, 9 aa, Streptococcus pyogenes
ILSARLSKS

SEQ ID NO: 247 - protein, 9 aa, Streptococcus pyogenes
LTLLKALVR

SEQ ID NO: 248 - protein, 9 aa, Streptococcus pyogenes
FYKFIKPIL

SEQ ID NO: 249 - protein, 9 aa, Streptococcus pyogenes
LFKTNRKVT

SEQ ID NO: 250 - protein, 9 aa, Streptococcus pyogenes
MKQLKRRRY

SEQ ID NO: 251 - protein, 9 aa, Streptococcus pyogenes
WGRLSRKLI

SEQ ID NO: 252 - protein, 9 aa, Streptococcus pyogenes
VITLKSKLV

SEQ ID NO: 253 - protein, 9 aa, Streptococcus pyogenes
FATVRKVLS

SEQ ID NO: 254 - protein, 9 aa, Streptococcus pyogenes
LKRTARRRY

SEQ ID NO: 255 - protein, 9 aa, Streptococcus pyogenes
IYHLRKKLV

SEQ ID NO: 256 - protein, 9 aa, Streptococcus pyogenes
LAHMIKFRG

SEQ ID NO: 257 - protein, 9 aa, Streptococcus pyogenes
ILSARLSKS

SEQ ID NO: 258 - protein, 9 aa, Streptococcus pyogenes
ARLSKSRRL

SEQ ID NO: 259 - protein, 9 aa, Streptococcus pyogenes
LTLLKALVR

SEQ ID NO: 260 - protein, 9 aa, Streptococcus pyogenes
IEKILTFRI

SEQ ID NO: 261 - protein, 9 aa, Streptococcus pyogenes
LLFKTNRKV

SEQ ID NO: 262 - protein, 9 aa, Streptococcus pyogenes
MKQLKRRRY

SEQ ID NO: 263 - protein, 9 aa, Streptococcus pyogenes
VITLKSKLV

SEQ ID NO: 264 - protein, 9 aa, Streptococcus pyogenes
IYLALAHMI

SEQ ID NO: 265 - protein, 9 aa, Streptococcus pyogenes
MIKFRGHFL

SEQ ID NO: 266 - protein, 9 aa, Streptococcus pyogenes
IEKILTFRI

SEQ ID NO: 267 - protein, 9 aa, Streptococcus pyogenes
VITLKSKLV

SEQ ID NO: 268 - protein, 9 aa, Streptococcus pyogenes
FFYSNIMNF

SEQ ID NO: 269 - protein, 9 aa, Streptococcus pyogenes
FLYLASHYE
